(19) United States
(12) Patent Application Publication
(10) Pub. No.: US 2003/0170663 A1
(43) Pub. Date: Sep. 11, 2003

(54) Nucleotide sequence of the Mycoplasma genitalium genome, fragments thereof, and uses thereof

(75) Inventors: Claire M. Fraser, Potomac, MD (US); Mark D. Adams, Rockville, MD (US); Jeannine D. Gocayne, Potomac, MD (US); Clyde A. Hutchison III, Chapel Hill, MD (US); Hamilton O. Smith, Reisterstown, MD (US); J. Craig Venter, Queenstown, MD (US); Owen R. White, Rockville, MD (US)

Correspondence Address: HUMAN GENOME SCIENCES INC, 9410 KEY WEST AVENUE, ROCKVILLE, MD, 20850

(73) Assignee: Johns Hopkins University, Baltimore, MD

(21) Appl. No.: 10/205,220

(22) Filed: Jul. 26, 2002

Related U.S. Application Data
(62) Division of application No. 08/545,528, filed on Oct. 19, 1995.
Application No. 08/545,528 is a continuation-in-part of application No. 08/488,018, filed on Jun. 7, 1995.
Application No. 08/545,528 is a continuation-in-part of application No. 08/473,545, filed on Jun. 7, 1995, now abandoned.

(51) Int. Cl. C12Q 1/68; C07H 21/04; C12N 9/00; C12N 1/21; C12P 21/02

(52) U.S. Cl. 435/6; 435/69.1; 435/183; 435/252.3; 435/320.1; 536/23.7

(57) ABSTRACT

The present invention provides the nucleotide sequence of the entire genome of Mycoplasma genitalium, SEQ ID NO: 1. The present invention further provides the sequence information stored on computer readable media, and computer-based systems and methods which facilitate its use. In addition to the entire genomic sequence, the present invention identifies protein encoding fragments of the genome, and identifies, by position relative to two (2) genes known to flank the origin of replication, any regulatory elements which modulate the expression of the protein encoding fragments of the Mycoplasma genitalium genome.

### CROSS-REFERENCE TO RELATED APPLICATIONS

[0001] This application is a divisional of and claims priority under 35 U.S.C. § 120 to U.S. application Ser. No. 08/545,528, filed Oct. 19, 1995, which is a continuation-in-part of and claims priority under 35 U.S.C. § 120 to U.S. application Ser. Nos. 08/488,018 and 08/473,545, both filed Jun. 7, 1995. U.S. application Ser. Nos. 08/488,018 and 08/473,545 are each hereby incorporated herein by reference.

### STATEMENT REGARDING FEDERALLY-SPONSORED RESEARCH AND DEVELOPMENT

[0002] Part of the work performed during development of this invention utilized U.S. Government funds. The U.S. Government may have certain right in the invention—DE-FC02-95ER61962.A000; NP-838C; NIH-AI08998, AI33161, and HL19171.

### REFERENCE TO SEQUENCE LISTING

[0003] This application refers to a “Sequence Listing” listed below, which is provided as an electronic document on two identical compact discs (CD-R), labeled “Copy 1” and “Copy 2.” These compact discs each contain the file “PB196P1D1.ST25.txt” (735,244 bytes, created on Jun. 24, 2002), which is hereby incorporated in its entirety herein.

### FIELD OF THE INVENTION

[0004] The present invention relates to the field of molecular biology. The invention discloses compositions comprising the nucleotide sequence of Mycoplasma genitalium, fragments thereof, and its use in medical diagnostics, therapies and pharmaceutical development.

### BACKGROUND OF THE INVENTION

[0005] Mycoplasmas are the smallest free-living bacterial organisms known (Colman, S. D. et al., Mol. Microbiol. 4:683-687 (1990)). Mycoplasmas are thought to have evolved from higher gram-positive bacteria through the loss of genetic material (Bailey, C. C. et al., J. Bacteriol. 176:5814-5819 (1994)). Mycoplasma genitalium (M. genitalium) is widely considered to be the smallest self-replicating biological system, as the molecular size of its genome has been shown to be only 570-600 kp (Pyle, L. E. et al., Nucleic Acids Res. 16(13):6015-6025 (1988); Peterson, S. N. et al., J. Bacteriol. 175:7918-7930 (1993)). All mycoplasmas lack a cell wall and have small genomes and a characteristically low G+C content (Razin, S., Microbiol. Rev. 49(4):419-455 (1985); Peterson, S. N. et al., J. Bacteriol. 175:7918-7930 (1993)). Some mycoplasmas, including M. genitalium, have a specialized codon usage, whereby UGA encodes tryptophan rather than serving as a stop codon (Inamine, J. M. et al., J. Bacteriol. 172:504-506 (1990); Tanaka, J. G. et al., Nucleic Acids Res. 19:6787-6792 (1991); Yamao, F. A. et al., Proc. Natl. Acad. Sci. USA 82:2306-2309 (1985)).

[0006] Mycoplasmas are widely known to be significant pathogens of humans, animals, and plants (Bailey, C. C. et al., J. Bacteriol. 176:5814-5819 (1994)). The metabolic systems of mycoplasmas indicate that they are generally biosynthetically deficient, and thus depend on the microenvironment of the host by characteristically adhering to host cells in order to obtain essential precursor molecules, i.e., amino acids, fatty acids and sterols etc. (Baseman, J. B., 1987. Mycoplasma Cell Membranes, Vol. 20. The Plenum Press, New York, N.Y.).

[0007] In particular, M. genitalium, a newly discovered species, is a pathogenic etiological agent first isolated in 1980 from the urethras of human males infected with non-gonococcal urethritis (Tully, J. G. et al., Lancet 1:1288-1291 (1981); Tully, J. G., et al., Int. J. Syst. Bacteriol. 33:387-396 (1983)). M. genitalium has also been identified in specimens of pneumonia patients as a co-isolate of Mycoplasma pneumoniae (Baseman, J. B. et al., J. Clin. Microbiol. 26:2266-2269 (1988)). M. genitalium opportunistic infection has often been observed in individuals infected with human immunodeficiency virus type 1 (HIV-1) (Lo, S. -C. et al., Amer. J. Trop. Med. Hyg. 41:601-616 (1989); Lo, S. -C. et al., Amer. J. Trop. Med. Hyg. 41:601-616 (1989); Sasaki, Y. et al., AIDS Res. Hum. Retrov. 9(8):775-780 (1993)). Mycoplasmas can also induce various cytokines, including tumor necrosis factor, which may enhance HIV replication (Chowdhury, I. H. et al., Biochem. Biophys. Res. Commun. 170:1365-1370 (1990)).

[0008] A high amino acid homology exists between the attachment protein of M. genitalium and the aligned proteins of several human Class II major histocompatibility complex proteins (HLA), suggesting that M. genitalium infection may play an important role in triggering autoimmune mechanisms, thereby aggravating the immunodeficiency characteristics of acquired immune deficiency syndrome (AIDS) (Montagnier, L. et al., C.R. Acad. Sci. Paris 311(3):425-430 (1990); Root-Bernstein, R. S. et al., Res. Immunol. 142:519-523 (1991); Bisset, L. R. Autoimmunity 14:167-168 (1992)). A diagnostic immunoassay for detecting M. genitalium infection using monoclonal antibodies specific for some M. genitalium antigens has been developed. Baseman, J. B. et al., U.S. Pat. No. 5,158,870.

[0009] Due to its diminutive genomic size, M. genitalium provides a useful model for determining the minimum number of genes and protein products necessary for a host-independent existence. M. genitalium expresses a characteristically low number of base-pairs and low G+C content, which along with its UGA tryptophan codon, has hampered sequencing efforts by conventional techniques (Razin, A., Microbiol. Rev. 49(4):419-455 (1985); Colman, S. D. et al., Gene 87:91-96 (1990); Dybvig, K. 1992. Gene Transfer In: Maniloff, J. (ed.) Mycoplasmas: Molecular Biology and Pathogenesis., Am. Soc. Microbiol. Washington, D.C., pp.355-362)). M. genitalium possesses a single circular chromosome (Colman, S. D. et al., Gene 87:91-96 (1990); Peterson, S. N. et al., J. Bacteriol. 175:7918-7930 (1993)). The characterization of the genome of M. genitalium has also been hampered by the lack of auxotrophic mutants and by the lack of a system for genetic exchange, precluding reverse genetic approaches. Thus, the sequencing of the M. genitalium genome would enhance the understanding of how M. genitalium causes or promotes various invasive or immunodeficiency diseases and to how best to medically combat mycoplasma infection.

[0010] Prior attempts at characterizing the structure and gene arrangement of the chromosomes of mycoplasmas using pulsed-field gel electrophoretic methods (Pyle, L. E. et al., Nucleic Acids Res. 16(13):6015-6025 (1988); Neimark, H. C. et al., Nucleic Acids Res. 18(18):5443-5448 (1990)), indicated that mycoplasmas have genomes ranging widely in size. Southern blot hybridization of digested DNAs of M. genitalium compared to the well-known human pathogen, M. pneumoniae, indicated overall low homology values of approximately 6-8% (Yogev, D. et al., Int. J. Syst. Bacteriol. 36(3):426-430 (1986)). However, high homologies have been reported between the adhesin genes of M. genitalium and M. pneumoniae (Dallo, S. F. et al., Microbial Path. 6:69-73 (1989)). Initial studies at characterizing the genome of M. genitalium by comparison to the well-known M. pneumoniae species, indicated that both species have three (3) rRNA genes clustered together in a chromosomal segment of about 5 kb and form a single operon organized in classical procaryotic fashion, but differences exist between their respective restriction sites (Yogev, D. et al., Int. J. Syst. Bacteriol. 36(3):426-430 (1986)).

[0011] Restriction enzyme mapping of M. genitalium indicates that the genome is approximately 600 kb. Several genes have also been mapped, including the single ribosomal operon, and the gene encoding the MgPa cytadhesion protein (Su, C. J. et al., J. Bacteriol. 172:4705-4707 (1990); Colman, S. D. et al., Mol. Microbiol. 4(4):683-687 (1990)). The entire restriction map of the genome of M. genitalium has also been cloned in an ordered library of 20 overlapping cosmids and one λ clone (Lucier, T. S. et al., Gene 150:27-34 (1994)).

[0012] An initial study using random sequencing techniques to characterize the M. genitalium genome resulted in forty-four (44) random clones being partially sequenced; several long open reading frames were also found (Peterson, S. N. et al., Nucleic Acids Rev. 19:6027-6031 (1991)). Subsequent work using random sequencing of 508 random nonidentical clones has allowed sequence information to be compiled for approximately seventeen percent (17%) (100,993 nucleotides) of the M. genitalium genome (Peterson, S. N. et al., J. Bacteriol. 175:7918-7930 (1993)). Sequence information indicates that the diminutive genome of M. genitalium contains numerous genes involved in various metabolic processes. The genome is estimated to encode approximately 390 proteins, indicating that M. genitalium makes very efficient use of its limited amount of DNA (Peterson, S. N. et al., J. Bacteriol. 175:7918-7930 (1993)).

[0013] Several studies have been undertaken to sequence and characterize individual genes identified in M. genitalium. In particular, the medically important aspects of M. genitalium have helped to direct interest to those genes which determine the degree of infectivity and the virulence characteristics of the organism. The nucleotide sequence and deduced amino acid sequence for the MgPa adhesin gene, i.e., the gene encoding the surface cytadhesion protein of M. genitalium, indicates that the complete gene contains 4,335 nucleotides coding for a protein of 159,668 Da. (Dallo, S. F. et al., Infect. Immun. 57(4):1059-1065 (1989)). Furthermore, subsequent nucleotide sequencing of the M. genitalium MgPa adhesin gene revealed the specific codon order for this important gene (Inamine, J. M. et al., Gene 82:259-267 (1989)). The MgPa adhesin gene also has been shown to express restriction fragment length polymorphism (Dallo, S. F. et al., Microbial Path. 10:475-480 (1991)). Nucleotide homology to the well-known highly conserved procaryotic origin-of-replication gene (gyrA) was noted for M. genitalium (Bailey, C. C. et al., J. Bacteriol. 176:5814-5819 (1994)). The highly conserved procaryotic elongation factor, Tu, encoded by the tuf gene, has been noted and sequenced for M. genitalium, and was found to contain an open reading frame encoding a protein of approximately 393 amino acids (Loechel, S. et al., Nucleic Acids Res. 17(23):10127 (1989)). The tuf gene of M. genitalium has also been determined to use a signal other than a Shine-Dalgamo (ribosomal binding site) sequence preceding the initiation codon (Loechel, S. et al., Nucleic Acids Res. 19:6905-6911 (1991)).

### SUMMARY OF THE INVENTION

[0014] The present invention is based on the sequencing of the Mycoplasma genitalium genome. The primary nucleotide sequence which was generated is provided in SEQ ID NO: 1.

[0015] The present invention provides the generated nucleotide sequence of the Mycoplasma genitalium genome, or a representative fragment thereof, in a form which can be readily used, analyzed, and interpreted by a skilled artisan. In one embodiment, present invention is provided as a contiguous string of primary sequence information corresponding to the nucleotide sequence depicted in SEQ ID NO: 1.

[0016] The present invention further provides nucleotide sequences which are at least 99.9% identical to the nucleotide sequence of SEQ ID NO: 1.

[0017] The nucleotide sequence of SEQ ID NO: 1, a representative fragment thereof, or a nucleotide sequence which is at least 99.9% identical to the nucleotide sequence of SEQ ID NO: 1 may be provided in a variety of mediums to facilitate its use. In one application of this embodiment, the sequences of the present invention are recorded on computer readable media. Such media includes, but is not limited to: magnetic storage media, such as floppy discs, hard disc storage medium, and magnetic tape; optical storage media such as CD-ROM; electrical storage media such as RAM and ROM; and hybrids of these categories such as magnetic/optical storage media.

[0018] The present invention further provides systems, particularly computer-based systems which contain the sequence information herein described stored in a data storage means. Such systems are designed to identify commercially important fragments of the Mycoplasma genitalium genome.

[0019] Another embodiment of the present invention is directed to isolated fragments of the Mycoplasma genitalium genome. The fragments of the Mycoplasma genitalium genome of the present invention include, but are not limited to, fragments which encode peptides, hereinafter open reading frames (ORFs), fragments which modulate the expression of an operably linked ORF, hereinafter expression modulating fragments (EMFs), fragments which mediate the uptake of a linked DNA fragment into a cell, hereinafter uptake modulating fragments (UMFs), and fragments which can be used to diagnose the presence of Mycoplasma genitalium in a sample, hereinafter, diagnostic fragments (DFs).

[0020] Each of the ORF fragments of the Mycoplasma genitalium genome disclosed in Tables 1(a), 1(c) and 2, and the EMF found 5′ to the ORF, can be used in numerous ways as polynucleotide reagents. The sequences can be used as diagnostic probes or diagnostic amplification primers for the presence of a specific microbe in a sample, for the production of commercially important pharmaceutical agents, and to selectively control gene expression.

[0021] The present invention further includes recombinant constructs comprising one or more fragments of the Mycoplasma genitalium genome of the present invention. The recombinant constructs of the present invention comprise vectors, such as a plasmid or viral vector, into which a fragment of the Mycoplasma genitalium has been inserted.

[0022] The present invention further provides host cells containing any one of the isolated fragments of the Mycoplasma genitalium genome of the present invention. The host cells can be a higher eukaryotic host such as a mammalian cell, a lower eukaryotic cell such as a yeast cell, or can be a procaryotic cell such as a bacterial cell.

[0023] The present invention is further directed to isolated proteins encoded by the ORFs of the present invention. A variety of methodologies known in the art can be utilized to obtain any one of the proteins of the present invention. At the simplest level, the amino acid sequence can be synthesized using commercially available peptide synthesizers. In an alternative method, the protein is purified from bacterial cells which naturally produce the protein. Lastly, the proteins of the present invention can alternatively be purified from cells which have been altered to express the desired protein.

[0024] The invention further provides methods of obtaining homologs of the fragments of the Mycoplasma genitalium genome of the present invention and homologs of the proteins encoded by the ORFs of the present invention. Specifically, by using the nucleotide and amino acid sequences disclosed herein as a probe or as primers, and techniques such as PCR cloning and colony/plaque hybridization, one skilled in the art can obtain homologs.

[0025] The invention further provides antibodies which selectively bind one of the proteins of the present invention. Such antibodies include both monoclonal and polyclonal antibodies.

[0026] The invention further provides hybridomas which produce the above-described antibodies. A hybridoma is an immortalized cell line which is capable of secreting a specific monoclonal antibody.

[0027] The present invention further provides methods of identifying test samples derived from cells which express one of the ORF of the present invention, or homolog thereof. Such methods comprise incubating a test sample with one or more of the antibodies of the present invention, or one or more of the DFs of the present invention, under conditions which allow a skilled artisan to determine if the sample contains the ORF or product produced therefrom.

[0028] In another embodiment of the present invention, kits are provided which contain the necessary reagents to carry out the above-described assays.

[0029] Specifically, the invention provides a compartmentalized kit to receive, in close confinement, one or more containers which comprises: (a) a first container comprising one of the antibodies, or one of the DFs of the present invention; and (b) one or more other containers comprising one or more of the following: wash reagents, reagents capable of detecting presence of bound antibodies or hybridized DFs.

[0030] Using the isolated proteins of the present invention, the present invention further provides methods of obtaining and identifying agents capable of binding to a protein encoded by one of the ORFs of the present invention. Specifically, such agents include antibodies (described above), peptides, carbohydrates, pharmaceutical agents and the like. Such methods comprise the steps of:

[0031] (a) contacting an agent with an isolated protein encoded by one of the ORFs of the present invention; and

[0032] (b) determining whether the agent binds to said protein.

[0033] The complete genomic sequence of M. genitalium will be of great value to all laboratories working with this organism and for a variety of commercial purposes. Many fragments of the Mycoplasma genitalium genome will be immediately identified by similarity searches against GenBank or protein databases and will be of immediate value to Mycoplasma researchers and for immediate commercial value for the production of proteins or to control gene expression. A specific example concerns PHA synthase. It has been reported that polyhydroxybutyrate is present in the membranes of M. genitalium and that the amount correlates with the level of competence for transformation. The PHA synthase that synthesizes this polymer has been identified and sequenced in a number of bacteria, none of which are evolutionarily close to M. genitalium. This gene has yet to be isolated from M. genitalium by use of hybridization probes or PCR techniques. However, the genomic sequence of the present invention allows the identification of the gene by utilizing search means described below.

[0034] Developing the methodology and technology for elucidating the entire genomic sequence of bacterial and other small genomes has and will greatly enhance the ability to analyze and understand chromosomal organization. In particular, sequenced genomes will provide the models for developing tools for the analysis of chromosome structure and function, including the ability to identify genes within large segments of genomic DNA, the structure, position, and spacing of regulatory elements, the identification of genes with potential industrial applications, and the ability to do comparative genomic and molecular phylogeny.

### BRIEF DESCRIPTION OF THE FIGURES

[0035] FIG. 1—EcoRI restriction map of the Mycoplasma genitalium genome.

[0036] FIG. 2—Block diagram of a computer system 102 that can be used to implement the computer-based systems of present invention.

[0037] FIG. 3—Summary of the Mycoplasma genitalium sequencing project.

[0038] FIG. 4—A circular representation of the M. genitalium chromosome. Outer concentric circle: Coding regions on the plus strand for which a gene identification was made. Second concentric circle: Coding regions on the minus strand for which a gene identification was made. Third concentric circle: The direction of transcription on each strand of the chromosome is depicted as an arrow starting at the putative origin of replication. Fourth concentric circle: Coverage by cosmid and lambda clones. Nineteen cosmid clones and one lambda clone were sequenced from each end to confirm the overall structure of the genome. Fifth concentric circle: The locations of the single ribosomal operon and the 33 tRNAs. The clusters of tRNAs (trnA, trnB, trnC, trnD and trnE) are indicated by the letters A-E with the number of tRNAs in each cluster listed in parentheses. Sixth concentric circle: Location of the MgPa operon and MgPa repeat fragments.

[0039] FIGS. 5A-5R—Gene map of the M. genitalium genome. Predicted coding regions are shown on each strand. The rRNA operon and tRNA genes are shown as described in the Figure key. Gene identification numbers correspond to those in Table 6.

[0040] FIG. 6—Location of the MgPa repeats in the M. genitalium genome. The structure of the MgPa operon (ORF1-MgPa gene-ORF3) in the M. genitalium genome is illustrated across the top. In addition to the complete operon, nine repetitive elements which are composites of particular regions of the MgPa operon were found. The coordinates of each repeat in the genome are indicated on the left and right end of each line. The repetitive elements are located directly below those regions in the operon for which there is sequence similarity. The percent of sequence identity between the repeat elements and the MgPa gene ranges from 78%-90%. In some of the repeats, the MgPa-related sequences are separated in the genome by a variable length, A-T rich spacer sequence (indicated in the figure by a line with the length of the spacer indicated in bp). In cases where no spacer sequence is shown, the composites of the operon are co-linear in the genome. In repeats 7 and 9, the order of the sequences in the repeats differs from that in the operon. In these cases, the order of the elements in each repeat in the genome is indicated numerically where element 1 is followed by element 2 which is followed by element 3, etc.

### DETAILED DESCRIPTION

[0041] The present invention is based on the sequencing of the Mycoplasma genitalium genome. The primary nucleotide sequence which was generated is provided in SEQ ID NO: 1. As used herein, the “primary sequence” refers to the nucleotide sequence represented by the IUPAC nomenclature system.

[0042] The sequence provided in SEQ ID NO: 1 is oriented relative to two genes (DNAA and DNA gyrase) known to flank the origin of replication of the Mycoplasma genitalium genome. A skilled artisan will readily recognize that this start/stop point was chosen for convenience and does not reflect a structural significance.

[0043] The present invention provides the nucleotide sequence of SEQ ID NO: 1, or a representative fragment thereof, in a form which can be readily used, analyzed, and interpreted by a skilled artisan. In one embodiment, the sequence is provided as a contiguous string of primary sequence information corresponding to the nucleotide sequence provided in SEQ ID NO: 1.

[0044] As used herein, a “representative fragment of the nucleotide sequence depicted in SEQ ID NO: 1” refers to any portion of SEQ ID NO: 1 which is not presently represented within a publicly available database. Preferred representative fragments of the present invention are Mycoplasma genitalium open reading frames, expression modulating fragments, uptake modulating fragments, and fragments which can be used to diagnose the presence of Mycoplasma genitalium in sample. A non-limiting identification of such preferred representative fragments is provided in Tables 1(a), 1(c) and 2.

[0045] The nucleotide sequence information provided in SEQ ID NO: 1 was obtained by sequencing the Mycoplasma genitalium genome using a megabase shotgun sequencing method. The nucleotide sequence provided in SEQ ID NO: 1 is a highly accurate, although not necessarily a 100% perfect, representation of the nucleotide sequence of the Mycoplasma genitalium genome.

[0046] As discussed in detail below, using the information provided in SEQ ID NO: 1 and in Tables 1(a), 1(c) and 2 together with routine cloning and sequencing methods, one of ordinary skill in the art would be able to clone and sequence all “representative fragments” of interest including open reading frames (ORFs) encoding a large variety of Mycoplasma genitalium proteins. In very rare instances, this may reveal a nucleotide sequence error present in the nucleotide sequence disclosed in SEQ ID NO: 1. Thus, once the present invention is made available (i.e., once the information in SEQ ID NO: 1 and Tables 1(a), 1(c) and 2 have been made available), resolving a rare sequencing error in SEQ ID NO: 1 would be well within the skill of the art. Nucleotide sequence editing software is publicly available. For example, Applied Biosystem's (AB) AutoAssembler™ can be used as an aid during visual inspection of nucleotide sequences.

[0047] Even if all of the very rare sequencing errors in SEQ ID NO: 1 were corrected, the resulting nucleotide sequence would still be at least 99.9% identical to the nucleotide sequence in SEQ ID NO: 1.

[0048] The nucleotide sequences of the genomes from different strains of Mycoplasma genitalium differ slightly. However, the nucleotide sequence of the genomes of all Mycoplasma genitalium strains will be at least 99.9% identical to the nucleotide sequence provided in SEQ ID NO: 1.

[0049] Thus, the present invention further provides nucleotide sequences which are at least 99.9% identical to the nucleotide sequence of SEQ ID NO: 1 in a form which can be readily used, analyzed and interpreted by the skilled artisan. Methods for determining whether a nucleotide sequence is at least 99.9% identical to the nucleotide sequence of SEQ ID NO: 1 are routine and readily available to the skilled artisan. For example, the well known fasta algorithm (Pearson and Lipman, Proc. Natl. Acad. Sci. USA 85:2444 (1988)) can be used to generate the percent identity of nucleotide sequences.

[0050] Computer Related Embodiments

[0051] The nucleotide sequence provided in SEQ ID NO: 1, a representative fragment thereof, or a nucleotide sequence at least 99.9% identical to SEQ ID NO: 1 may be “provided” in a variety of mediums to facilitate use thereof. As used herein, provided refers to a manufacture, other than an isolated nucleic acid molecule, which contains a nucleotide sequence of the present invention, i.e., the nucleotide sequence provided in SEQ ID NO: 1, a representative fragment thereof, or a nucleotide sequence at least 99.9% identical to SEQ ID NO: 1. Such a manufacture provides the Mycoplasma genitalium genome or a subset thereof (e.g., a Mycoplasma genitalium open reading frame (ORF)) in a form which allows a skilled artisan to examine the manufacture using means not directly applicable to examining the Mycoplasma genitalium genome or a subset thereof as it exists in nature or in purified form.

[0052] In one application of this embodiment, a nucleotide sequence of the present invention can be recorded on computer readable media. As used herein, “computer readable media” refers to any medium which can be read and accessed directly by a computer. Such media include, but are not limited to: magnetic storage media, such as floppy discs, hard disc storage medium, and magnetic tape; optical storage media such as CD-ROM; electrical storage media such as RAM and ROM; and hybrids of these categories such as magnetic/optical storage media. A skilled artisan can readily appreciate how any of the presently known computer readable mediums can be used to create a manufacture comprising computer readable medium having recorded thereon a nucleotide sequence of the present invention.

[0053] As used herein, “recorded” refers to a process for storing information on computer readable medium. A skilled artisan can readily adopt any of the presently know methods for recording information on computer readable medium to generate manufactures comprising the nucleotide sequence information of the present invention.

[0054] A variety of data storage structures are available to a skilled artisan for creating a computer readable medium having recorded thereon a nucleotide sequence of the present invention. The choice of the data storage structure will generally be based on the means chosen to access the stored information. In addition, a variety of data processor programs and formats can be used to store the nucleotide sequence information of the present invention on computer readable medium. The sequence information can be represented in a word processing text file, formatted in commercially-available software such as WordPerfect and Microsoft Word, or represented in the form of an ASCII file, stored in a database application, such as DB2, Sybase, Oracle, or the like. A skilled artisan can readily adapt any number of data processor structuring formats (e.g. text file or database) in order to obtain computer readable medium having recorded thereon the nucleotide sequence information of the present invention.

[0055] By providing the nucleotide sequence of SEQ ID NO: 1, a representative fragment thereof, or a nucleotide sequence at least 99.9% identical to SEQ ID NO: 1 in computer readable form, a skilled artisan can routinely access the sequence information for a variety of purposes. Computer software is publicly available which allows a skilled artisan to access sequence information provided in a computer readable medium. The examples which follow demonstrate how software which implements the BLAST (Altschul et al., J. Mol. Biol. 215:403-410 (1990)) and BLAZE (Brutlag et al., Comp. Chem. 17:203-207 (1993)) search algorithms on a Sybase system was used to identify open reading frames (ORFs) within the Mycoplasma genitalium genome which contain homology to ORFs or proteins from other organisms. Such ORFs are protein encoding fragments within the Mycoplasma genitalium genome and are useful in producing commercially important proteins such as enzymes used in fermentation reactions and in the production of commercially useful metabolites.

[0056] The present invention further provides systems, particularly computer-based systems, which contain the sequence information described herein. Such systems are designed to identify commercially important fragments of the Mycoplasma genitalium genome.

[0057] As used herein, “a computer-based system” refers to the hardware means, software means, and data storage means used to analyze the nucleotide sequence information of the present invention. The minimum hardware means of the computer-based systems of the present invention comprises a central processing unit (CPU), input means, output means, and data storage means. A skilled artisan can readily appreciate that any one of the currently available computer-based system are suitable for use in the present invention.

[0058] As stated above, the computer-based systems of the present invention comprise a data storage means having stored therein a nucleotide sequence of the present invention and the necessary hardware means and software means for supporting and implementing a search means. As used herein, “data storage means” refers to memory which can store nucleotide sequence information of the present invention, or a memory access means which can access manufactures having recorded thereon the nucleotide sequence information of the present invention.

[0059] As used herein, “search means” refers to one or more programs which are implemented on the computer-based system to compare a target sequence or target structural motif with the sequence information stored within the data storage means. Search means are used to identify fragments or regions of the Mycoplasma genitalium genome which match a particular target sequence or target motif. A variety of known algorithms are disclosed publicly and a variety of commercially available software for conducting search means are available and can be used in the computer-based systems of the present invention. Examples of such software includes, but is not limited to, MacPattern (EMBL), BLASTN and BLASTX (NCBIA). A skilled artisan can readily recognize that any one of the available algorithms or implementing software packages for conducting homology searches can be adapted for use in the present computer-based systems.

[0060] As used herein, a “target sequence” can be any DNA or amino acid sequence of six or more nucleotides or two or more amino acids. A skilled artisan can readily recognize that the longer a target sequence is, the less likely a target sequence will be present as a random occurrence in the database. The most preferred sequence length of a target sequence is from about 10 to 100 amino acids or from about 30 to 300 nucleotide residues. However, it is well recognized that searches for commercially important fragments of the Mycoplasma genitalium genome, such as sequence fragments involved in gene expression and protein processing, may be of shorter length.

[0061] As used herein, “a target structural motif,” or “target motif,” refers to any rationally selected sequence or combination of sequences in which the sequence(s) are chosen based on a three-dimensional configuration which is formed upon the folding of the target motif. There are a variety of target motifs known in the art. Protein target motifs include, but are not limited to, enzymatic active sites and signal sequences. Nucleic acid target motifs include, but are not limited to, promoter sequences, hairpin structures and inducible expression elements (protein binding sequences).

[0062] A variety of structural formats for the input and output means can be used to input and output the information in the computer-based systems of the present invention. A preferred format for an output means ranks fragments of the Mycoplasma genitalium genome possessing varying degrees of homology to the target sequence or target motif. Such presentation provides a skilled artisan with a ranking of sequences which contain various amounts of the target sequence or target motif and identifies the degree of homology contained in the identified fragment.

[0063] A variety of comparing means can be used to compare a target sequence or target motif with the data storage means to identify sequence fragments of the Mycoplasma genitalium genome. In the present examples, implementing software which implement the BLAST and BLAZE algorithms (Altschul et al., J. Mol. Biol. 215:403-410 (1990)) was used to identify open reading frames within the Mycoplasma genitalium genome. A skilled artisan can readily recognize that any one of the publicly available homology search programs can be used as the search means for the computer-based systems of the present invention.

[0064] One application of this embodiment is provided in FIG. 2. FIG. 2 provides a block diagram of a computer system 102 that can be used to implement the present invention. The computer system 102 includes a processor 106 connected to a bus 104. Also connected to the bus 104 are a main memory 108 (preferably implemented as random access memory, RAM) and a variety of secondary storage devices 110, such as a hard drive 112 and a removable medium storage device 114. The removable medium storage device 114 may represent, for example, a floppy disk drive, a CD-ROM drive, a magnetic tape drive, etc. A removable storage medium 116 (such as a floppy disk, a compact disk, a magnetic tape, etc.) containing control logic and/or data recorded therein may be inserted into the removable medium storage device 114. The computer system 102 includes appropriate software for reading the control logic and/or the data from the removable medium storage device 114 once inserted in the removable medium storage device 114.

[0065] A nucleotide sequence of the present invention may be stored in a well known manner in the main memory 108, any of the secondary storage devices 110, and/or a removable storage medium 116. Software for accessing and processing the genomic sequence (such as search tools, comparing tools, etc.) reside in main memory 108 during execution.

[0066] Biochemical Embodiments

[0067] Another embodiment of the present invention is directed to isolated fragments of the Mycoplasma genitalium genome. The fragments of the Mycoplasma genitalium genome of the present invention include, but are not limited to fragments which encode peptides, hereinafter open reading frames (ORFs), fragments which modulate the expression of an operably linked ORF, hereinafter expression modulating fragments (EMFs), fragments which mediate the uptake of a linked DNA fragment into a cell, hereinafter uptake modulating fragments (UMFs), and fragments which can be used to diagnose the presence of Mycoplasma genitalium in a sample, hereinafter diagnostic fragments (DFs).

[0068] As used herein, an “isolated nucleic acid molecule” or an “isolated fragment of the Mycoplasma genitalium genome” refers to a nucleic acid molecule possessing a specific nucleotide sequence which has been subjected to purification means to reduce, from the composition, the number of compounds which are normally associated with the composition. A variety of purification means can be used to generated the isolated fragments of the present invention. These include, but are not limited to methods which separate constituents of a solution based on charge, solubility, or size.

[0069] In one embodiment, Mycoplasma genitalium DNA can be mechanically sheared to produce fragments of 15-20 kb in length. These fragments can then be used to generate an Mycoplasma genitalium library by inserting them into lambda clones as described in the Examples below. Primers flanking, for example, an ORF provided in Table 1(a), 1(c) or 2 can then be generated using nucleotide sequence information provided in SEQ ID NO: 1. PCR cloning can then be used to isolate the ORF from the lambda DNA library. PCR cloning is well known in the art. Thus, given the availability of SEQ ID NO: 1, Table 1(a), 1(c) and Table 2, it would be routine to isolate any ORF or other representative fragment of the present invention.

[0070] The isolated nucleic acid molecules of the present invention include, but are not limited to single stranded and double stranded DNA, and single stranded RNA.

[0071] As used herein, an “open reading frame,” ORF, means a series of triplets coding for amino acids without any termination codons and is a sequence translatable into protein. Tables 1(a), 1(b), 1(c) and 2 identify ORFs in the Mycoplasma genitalium genome. In particular, Table 1(a) indicates the location of ORFs (i.e., the addresses) within the Mycoplasma genitalium genome which encode the recited protein based on homology matching with protein sequences from the organism appearing in parentheticals (see the fifth column of Table 1(a)).

[0072] The first column of Table 1(a) provides the “UID” (an arbitrary identification number) of a particular ORF. The second and third columns in Table 1(a) indicate an ORFs position in the nucleotide sequence provided in SEQ ID NO: 1. One of ordinary skill in the art will recognize that ORFs may be oriented in opposite directions in the Mycoplasma genitalium genome. This is reflected in columns 2 and 3.

[0073] The fourth column of Table 1(a) provides the accession number of the database match for the ORF. As indicated above, the fifth column of Table 1(a) provides the name of the database match for the ORF.

[0074] The sixth column of Table 1(a) indicates the percent identity of the protein encoded for by an ORF to the corresponding protein from the organism appearing in parentheticals in the fifth column. The seventh column of Table 1(a) indicates the percent similarity of the protein encoded for by an ORF to the corresponding protein from the organism appearing in parentheticals in the fifth column. The concepts of percent identity and percent similarity of two polypeptide sequences are well understood in the art. For example, two polypeptides 10 amino acids in length which differ at three amino acid positions (e.g., at positions 1, 3 and 5) are said to have a percent identity of 70%. However, the same two polypeptides would be deemed to have a percent similarity of 80% if, for example at position 5, the amino acids moieties, although not identical, were “similar” (i.e., possessed similar biochemical characteristics). The eighth column in Table 1(a) indicates the length of the ORF in nucleotides.

[0075] Table 1(b) is a list of ORFs that have database matches to previously published Mycoplasma genitalium sequences over the full length of the ORF. The table headings for Table 1(b) are identical for Table 1(a) with the following two exceptions: (II) The heading for the eighth column in Table 1(a) (i.e., nucleotide length of the ORF) has been replaced with the following in Table 1(b): “Match_info”. “Match_info” refers to the coordinates of the match of the ORF and the previously published Mycoplasma genitalium sequence. For example, “MG002 (1-930 of 930) GB:U09251 (298-1227 of 6140),” indicates that for ORF MG002, which is 930 nucleotides in length, there is a database match to accession number GB:U09251, which has a total length of 6140 nucleotides. The ORF matches this accession from position 298 to 1227.

[0076] (II) Where an ORF shows homology matches for both a previously published Mycoplasma genitalium sequence and a previously published sequence from a different organism, columns 3, 4, 5, and 6 of Table 1(b) respectively provide the accession number, protein name (and organism in parentheticals), percent identity and percent similarity for the “other organism,” rather than for the previously published Mycoplasma genitalium sequence. (However, in this scenario, the accession number for the Mycoplasma genitalium sequence is still provided in column 8.)

[0077] Table 1(c) provides ORFs having database matches to previously published Mycoplasma genitalium sequences but only over a portion of the ORF. The table headings are the same as above for Table 1(b).

[0078] In Tables 1(a), 1(b) and 1(c), unique identifiers are used to identify the recited ORFs, (e.g., “MG123”). In the parent U.S. application Ser. Nos. 08/488,018 and 08/473,545, the recited ORFs are identified using the “MORF” identifier. Table 1(d) lists which of the new and old identifiers refer to the same ORF. For example, the first entry in Table 1(d) indicates that the ORF identified as MG001 in the current application is the same ORF which was previously identified as MORF-20072 in parent U.S. application Ser. Nos. 08/488,018 and 08/473,545. Similarly, the third entry in Table 1(d) indicates that the ORF identified as MG003 in the current application is the same ORF which was previously identified as MORF-19818 and MORF-20073 in the parent applications.

[0079] Table 2 provides ORFs of the Mycoplasma genitalium genome which did not elicit a “homology match” with a known sequence from either M. genitalium or another organism.

[0080] Table 6 classifies each ORF according to its role category (adapted from Riley, M., Microbiol. Rev. 57:862 (1992)). The gene identification, the accession number from public archives that corresponds to the best match, the percent amino acid identity, and the length of the match in amino acids is also listed for each entry as above in Tables 1 (a-c). Those genes in M. genitalium that also match a gene in H. influenzae are indicated by an asterisk (*). For the purposes of Tables 6 and 7 and FIG. 4, each of the MgPa repetitive elements has been assigned an MG number, even though there is evidence to suggest that these repeats may not be transcribed.

[0081] Table 7 sorts the gene content in H. influenzae and M. genitalium by functional category. The number of genes in each category is listed for each organism. The number in parentheses indicates the percent of the putatively identified genes devoted to each functional category. For the category of unassigned genes, the percent of the genome indicated in parentheses represents the percent of the total number of putative coding regions.

[0082] Further details concerning the algorithms and criteria used for homology searches are provided in the Examples below.

[0083] A skilled artisan can readily identify ORFs in the Mycoplasma genitalium genome other than those listed in Tables 1(a), 1(b), 1(c) and 2, such as ORFs which are overlapping or encoded by the opposite strand of an identified ORF in addition to those ascertainable using the computer-based systems of the present invention.

[0084] As used herein, an “expression modulating fragment,” EMF, means a series of nucleotide molecules which modulates the expression of an operably linked ORF or EMF.

[0085] As used herein, a sequence is said to “modulate the expression of an operably linked sequence” when the expression of the sequence is altered by the presence of the EMF. EMFs include, but are not limited to, promoters, and promoter modulating sequences (inducible elements). One class of EMFs are fragments which induce the expression or an operably linked ORF in response to a specific regulatory factor or physiological event. A review of known EMFs from Mycoplasma are described by (Tomb et al. Gene 104:1-10 (1991), Chandler, M. S., Proc. Natl. Acad. Sci. USA 89:1626-1630 (1992).

[0086] EMF sequences can be identified within the Mycoplasma genitalium genome by their proximity to the ORFs provided in Tables 1(a), 1(b), 1(c) and 2. An intergenic segment, or a fragment of the intergenic segment, from about 10 to 200 nucleotides in length, taken 5′ from any one of the ORFs of Tables 1(a), 1(b), 1(c) or 2 will modulate the expression of an operably linked 3′ ORF in a fashion similar to that found with the naturally linked ORF sequence. As used herein, an “intergenic segment” refers to the fragments of the Mycoplasma genome which are between two ORF(s) herein described. Alternatively, EMFs can be identified using known EMFs as a target sequence or target motif in the computer-based systems of the present invention.

[0087] The presence and activity of an EMF can be confirmed using an EMF trap vector. An EMF trap vector contains a cloning site 5′ to a marker sequence. A marker sequence encodes an identifiable phenotype, such as antibiotic resistance or a complementing nutrition auxotrophic factor, which can be identified or assayed when the EMF trap vector is placed within an appropriate host under appropriate conditions. As described above, an EMF will modulate the expression of an operably linked marker sequence. A more detailed discussion of various marker sequences is provided below.

[0088] A sequence which is suspected as being an EMF is cloned in all three reading frames in one or more restriction sites upstream from the marker sequence in the EMF trap vector. The vector is then transformed into an appropriate host using known procedures and the phenotype of the transformed host in examined under appropriate conditions. As described above, an EMF will modulate the expression of an operably linked marker sequence.

[0089] As used herein, an “uptake modulating fragment,” UMF, means a series of nucleotide molecules which mediate the uptake of a linked DNA fragment into a cell. UMFs can be readily identified using known UMFs as a target sequence or target motif with the computer-based systems described above.

[0090] The presence and activity of a UMF can be confirmed by attaching the suspected UMF to a marker sequence. The resulting nucleic acid molecule is then incubated with an appropriate host under appropriate conditions and the uptake of the marker sequence is determined. As described above, a UMF will increase the frequency of uptake of a linked marker sequence. A review of DNA uptake in Mycoplasma is provided by Goodgall, S. H., et al., J. Bact. 172:5924-5928 (1990).

[0091] As used herein, a “diagnostic fragment,” DF, means a series of nucleotide molecules which selectively hybridize to Mycoplasma genitalium sequences. DFs can be readily identified by identifying unique sequences within the Mycoplasma genitalium genome, or by generating and testing probes or amplification primers consisting of the DF sequence in an appropriate diagnostic format which determines amplification or hybridization selectivity.

[0092] The sequences falling within the scope of the present invention are not limited to the specific sequences herein described, but also include allelic and species variations thereof. Allelic and species variations can be routinely determined by comparing the sequence provided in SEQ ID NO: 1, a representative fragment thereof, or a nucleotide sequence at least 99.9% identical to SEQ ID NO: 1 with a sequence from another isolate of the same species. Furthermore, to accommodate codon variability, the invention includes nucleic acid molecules coding for the same amino acid sequences as do the specific ORFs disclosed herein. In other words, in the coding region of an ORF, substitution of one codon for another which encodes the same amino acid is expressly contemplated.

[0093] Any specific sequence disclosed herein can be readily screened for errors by resequencing a particular fragment, such as an ORF, in both directions (i.e., sequence both strands). Alternatively, error screening can be performed by sequencing corresponding polynucleotides of Mycoplasma genitalium origin isolated by using part or all of the fragments in question as a probe or primer.

[0094] Each of the ORFs of the Mycoplasma genitalium genome disclosed in Tables 1(a), 1(b), 1(c) and 2, and the EMF found 5′ to the ORF, can be used in numerous ways as polynucleotide reagents. The sequences can be used as diagnostic probes or diagnostic amplification primers to detect the presence of a specific microbe, such as Mycoplasma genitalium, in a sample. This is especially the case with the fragments or ORFs of Table 2, which will be highly selective for Mycoplasma genitalium.

[0095] In addition, the fragments of the present invention, as broadly described, can be used to control gene expression through triple helix formation or antisense DNA or RNA, both of which methods are based on the binding of a polynucleotide sequence to DNA or RNA. Polynucleotides suitable for use in these methods are usually 20 to 40 bases in length and are designed to be complementary to a region of the gene involved in transcription (triple helix—see Lee et a., Nucl. Acids Res. 6:3073 (1979); Cooney et al., Science 241:456 (1988); and Dervan et al., Science 251:1360 (1991)) or to the mRNA itself (antisense—Okano, J. Neurochem. 56:560 (1991); Oligodeoxynucleotides as Antisense Inhibitors of Gene Expression, CRC Press, Boca Raton, Fla. (1988)).

[0096] Triple helix-formation optimally results in a shut-off of RNA transcription from DNA, while antisense RNA hybridization blocks translation of an MRNA molecule into polypeptide. Both techniques have been demonstrated to be effective in model systems. Information contained in the sequences of the present invention is necessary for the design of an antisense or triple helix oligonucleotide.

[0097] The present invention further provides recombinant constructs comprising one or more fragments of the Mycoplasma genitalium genome of the present invention. The recombinant constructs of the present invention comprise a vector, such as a plasmid or viral vector, into which a fragment of the Mycoplasma genitalium has been inserted, in a forward or reverse orientation. In the case of a vector comprising one of the ORFs of the present invention, the vector may further comprise regulatory sequences, including for example, a promoter, operably linked to the ORF. For vectors comprising the EMFs and UMFs of the present invention, the vector may further comprise a marker sequence or heterologous ORF operably linked to the EMF or UMF. Large numbers of suitable vectors and promoters are known to those of skill in the art and are commercially available for generating the recombinant constructs of the present invention. The following vectors are provided by way of example. Bacterial: pBs, phagescript, PsiX174, pBluescript SK, pBs KS, pNH8a, pNH16a, pNH18a, pNH46a (Stratagene); pTrc99A, pKK223-3, pKK233-3, pDR540, pRIT5 (Pharmacia). Eukaryotic: pWLneo, pSV2cat, pOG44, pXT1, pSG (Stratagene) pSVK3, pBPV, pMSG, pSVL (Pharmacia).

[0098] Promoter regions can be selected from any desired gene using CAT (chloramphenicol transferase) vectors or other vectors with selectable markers. Two appropriate vectors are pKK232-8 and pCM7. Particular named bacterial promoters include lacI, lacZ, T3, T7, gpt, lambda P_{R}, and trc. Eukaryotic promoters include CMV immediate early, HSV thymidine kinase, early and late SV40, LTRs from retrovirus, and mouse metallothionein-I. Selection of the appropriate vector and promoter is well within the level of ordinary skill in the art.

[0099] The present invention further provides host cells containing any one of the isolated fragments of the Mycoplasma genitalium genome of the present invention, wherein the fragment has been introduced into the host cell using known transformulation methods. The host cell can be a higher eukaryotic host cell, such as a mammalian cell, a lower eukaryotic host cell, such as a yeast cell, or the host cell can be a procaryotic cell, such as a bacterial cell. Introduction of the recombinant construct into the host cell can be effected by calcium phosphate transfection, DEAE, dextran mediated transfection, or electroporation (Davis, L. et al., Basic Methods in Molecular Biology (1986)).

[0100] The host cells containing one of the fragments of the Mycoplasma genitalium genome of the present invention, can be used in conventional manners to produce the gene product encoded by the isolated fragment (in the case of an ORF) or can be used to produce a heterologous protein under the control of the EMF.

[0101] The present invention fuirther provides isolated polypeptides encoded by the nucleic acid fragments of the present invention or by degenerate variants of the nucleic acid fragments of the present invention. By “degenerate variant” is intended nucleotide fragments which differ from a nucleic acid fragment of the present invention (e.g., an ORF) by nucleotide sequence but, due to the degeneracy of the Genetic Code, encode an identical polypeptide sequence. Preferred nucleic acid fragments of the present invention are the ORFs depicted in Tables 1(a), 1(c) and 2.

[0102] A variety of methodologies known in the art can be utilized to obtain any one of the isolated polypeptides or proteins of the present invention. At the simplest level, the amino acid sequence can be synthesized using commercially available peptide synthesizers. This is particularly useful in producing small peptides and fragments of larger polypeptides. Fragments are useful, for example, in generating antibodies against the native polypeptide. In an alternative method, the polypeptide or protein is purified from bacterial cells which naturally produce the polypeptide or protein. One skilled in the art can readily follow known methods for isolating polypeptides and proteins in order to obtain one of the isolated polypeptides or proteins of the present invention. These include, but are not limited to, immunochromatography, HPLC, size-exclusion chromatography, ion-exchange chromatography, and immuno-affinity chromatography.

[0103] The polypeptides and proteins of the present invention can alternatively be purified from cells which have been altered to express the desired polypeptide or protein. As used herein, a cell is said to be altered to express a desired polypeptide or protein when the cell, through genetic manipulation, is made to produce a polypeptide or protein which it normally does not produce or which the cell normally produces at a lower level. One skilled in the art can readily adapt procedures for introducing and expressing either recombinant or synthetic sequences into eukaryotic or prokaryotic cells in order to generate a cell which produces one of the polypeptides or proteins of the present invention.

[0104] Any host/vector system can be used to express one or more of the ORFs of the present invention. These include, but are not limited to, eukaryotic hosts such as HeLa cells, Cv-1 cell, COS cells, and Sf9 cells, as well as prokaryotic host such as E. coli and B. subtilis. The most preferred cells are those which do not normally express the particular polypeptide or protein or which expresses the polypeptide or protein at low natural level.

[0105] “Recombinant,” as used herein, means that a polypeptide or protein is derived from recombinant (e.g., microbial or mammalian) expression systems. “Microbial” refers to recombinant polypeptides or proteins made in bacterial or fungal (e.g., yeast) expression systems. As a product, “recombinant microbial” defines a polypeptide or protein essentially free of native endogenous substances and unaccompanied by associated native glycosylation. Polypeptides or proteins expressed in most bacterial cultures, e.g., E. coli, will be free of glycosylation modifications; polypeptides or proteins expressed in yeast will have a glycosylation pattern different from that expressed in mammalian cells.

[0106] “Nucleotide sequence” refers to a heteropolymer of deoxyribonucleotides. Generally, DNA segments encoding the polypeptides and proteins provided by this invention are assembled from fragments of the Mycoplasma genitalium genome and short oligonucleotide linkers, or from a series of oligonucleotides, to provide a synthetic gene which is capable of being expressed in a recombinant transcriptional unit comprising regulatory elements derived from a microbial or viral operon.

[0107] “Recombinant expression vehicle or vector” refers to a plasmid or phage or virus or vector, for expressing a polypeptide from a DNA (RNA) sequence. The expression vehicle can comprise a transcriptional unit comprising an assembly of (1) a genetic element or elements having a regulatory role in gene expression, for example, promoters or enhancers, (2) a structural or coding sequence which is transcribed into mRNA and translated into protein, and (3) appropriate transcription initiation and termination sequences. Structural units intended for use in yeast or eukaryotic expression systems preferably include a leader sequence enabling extracellular secretion of translated protein by a host cell. Alternatively, where recombinant protein is expressed without a leader or transport sequence, it may include an N-terminal methionine residue. This residue may or may not be subsequently cleaved from the expressed recombinant protein to provide a final product.

[0108] “Recombinant expression system” means host cells which have stably integrated a recombinant transcriptional unit into chromosomal DNA or carry the recombinant transcriptional unit extra chromosomally. The cells can be prokaryotic or eukaryotic. Recombinant expression systems as defined herein will express heterologous polypeptides or proteins upon induction of the regulatory elements linked to the DNA segment or synthetic gene to be expressed.

[0109] Mature proteins can be expressed in mammalian cells, yeast, bacteria, or other cells under the control of appropriate promoters. Cell-free translation systems can also be employed to produce such proteins using RNAs derived from the DNA constructs of the present invention. Appropriate cloning and expression vectors for use with prokaryotic and eukaryotic hosts are described by Sambrook, et al., in Molecular Cloning: A Laboratory Manual, Second Edition, Cold Spring Harbor, N.Y. (1989), the disclosure of which is hereby incorporated by reference.

[0110] Generally, recombinant expression vectors will include origins of replication and selectable markers permitting transformation of the host cell, e.g., the ampicillin resistance gene of E. coli and S. cerevisiae TRP1 gene, and a promoter derived from a highly-expressed gene to direct transcription of a downstream structural sequence. Such promoters can be derived from operons encoding glycolytic enzymes such as 3-phosphoglycerate kinase (PGK), a-factor, acid phosphatase, or heat shock proteins, among others. The heterologous structural sequence is assembled in appropriate phase with translation initiation and termination sequences, and preferably, a leader sequence capable of directing secretion of translated protein into the periplasmic space or extracellular medium. Optionally, the heterologous sequence can encode a fusion protein including an N-terminal identification peptide imparting desired characteristics, e.g., stabilization or simplified purification of expressed recombinant product.

[0111] Useful expression vectors for bacterial use are constructed by inserting a structural DNA sequence encoding a desired protein together with suitable translation initiation and termination signals in operable reading phase with a functional promoter. The vector will comprise one or more phenotypic selectable markers and an origin of replication to ensure maintenance of the vector and to, if desirable, provide amplification within the host. Suitable prokaryotic hosts for transformation include E. coli, Bacillus subtilis, Salmonella typhimurium and various species within the genera Pseudomonas, Streptomyces, and Staphylococcus, although others may, also be employed as a matter of choice.

[0112] As a representative but nonlimiting example, useful expression vectors for bacterial use can comprise a selectable marker and bacterial origin of replication derived from commercially available plasmids comprising genetic elements of the well known cloning vector pBR322 (ATCC 37017). Such commercial vectors include, for example, pKK223-3 (Pharmacia Fine Chemicals, Uppsala, Sweden) and GEM 1 (Promega Biotec, Madison, Wis., USA). These pBR322 “backbone” sections are combined with an appropriate promoter and the structural sequence to be expressed.

[0113] Following transformation of a suitable host strain and growth of the host strain to an appropriate cell density, the selected promoter is derepressed by appropriate means (e.g., temperature shift or chemical induction) and cells are cultured for an additional period. Cells are typically harvested by centrifugation, disrupted by physical or chemical means, and the resulting crude extract retained for further purification.

[0114] Various mammalian cell culture systems can also be employed to express recombinant protein. Examples of mammalian expression systems include the COS-7 lines of monkey kidney fibroblasts, described by Gluzman, Cell 23:175 (1981), and other cell lines capable of expressing a compatible vector, for example, the C127, 3T3, CHO, HeLa and BHK cell lines. Mammalian expression vectors will comprise an origin of replication, a suitable promoter and enhancer, and also any necessary ribosome binding sites, polyadenylation site, splice donor and acceptor sites, transcriptional termination sequences, and 5′ flanking nontranscribed sequences. DNA sequences derived from the SV40 viral genome, for example, SV40 origin, early promoter, enhancer, splice, and polyadenylation sites may be used to provide the required nontranscribed genetic elements.

[0115] Recombinant polypeptides and proteins produced in bacterial culture is usually isolated by initial extraction from cell pellets, followed by one or more salting-out, aqueous ion exchange or size exclusion chromatography steps. Protein refolding steps can be used, as necessary, in completing configuration of the mature protein. Finally, high performance liquid chromatography (HPLC) can be employed for final purification steps. Microbial cells employed in expression of proteins can be disrupted by any convenient method, including freeze-thaw cycling, sonication, mechanical disruption, or use of cell lysing agents.

[0116] The present invention further includes isolated polypeptides, proteins and nucleic acid molecules which are substantially equivalent to those herein described. As used herein, substantially equivalent can refer both to nucleic acid and amino acid sequences, for example a mutant sequence, that varies from a reference sequence by one or more substitutions, deletions, or additions, the net effect of which does not result in an adverse functional dissimilarity between reference and subject sequences. For purposes of the present invention, sequences having equivalent biological activity, and equivalent expression characteristics are considered substantially equivalent. For purposes of determining equivalence, truncation of the mature sequence should be disregarded.

[0117] The invention further provides methods of obtaining homologs from other strains of Mycoplasma genitalium, of the fragments of the Mycoplasma genitalium genome of the present invention and homologs of the proteins encoded by the ORFs of the present invention. As used herein, a sequence or protein of Mycoplasma genitalium is defined as a homolog of a fragment of the Mycoplasma genitalium genome or a protein encoded by one of the ORFs of the present invention, if it shares significant homology to one of the fragments of the Mycoplasma genitalium genome of the present invention or a protein encoded by one of the ORFs of the present invention. Specifically, by using the sequence disclosed herein as a probe or as primers, and techniques such as PCR cloning and colony/plaque hybridization, one skilled in the art can obtain homologs.

[0118] As used herein, two nucleic acid molecules or proteins are said to “share significant homology” if the two contain regions which process greater than 85% sequence (amino acid or nucleic acid) homology.

[0119] Region specific primers or probes derived from the nucleotide sequence provided in SEQ ID NO: 1 or from a nucleotide sequence at least 99.9% identical to SEQ ID NO: 1 can be used to prime DNA synthesis and PCR amplification, as well as to identify colonies containing cloned DNA encoding a homolog using known methods (Innis et al., PCR Protocols, Academic Press, San Diego, Calif. (1990)).

[0120] When using primers derived from SEQ ID NO: 1 or from a nucleotide sequence at least 99.9% identical to SEQ ID NO: 1, one skilled in the art will recognize that by employing high stringency conditions (e.g., annealing at 50-60° C.) only sequences which are greater than 75% homologous to the primer will be amplified. By employing lower stringency conditions (e.g., annealing at 35-37° C.), sequences which are greater than 40-50% homologous to the primer will also be amplified.

[0121] When using DNA probes derived from SEQ ID NO: 1 or from a nucleotide sequence at least 99.9% identical to SEQ ID NO: 1 for colony/plaque hybridization, one skilled in the art will recognize that by employing high stringency conditions (e.g., hybridizing at 50-65° C. in 5× SSC and 50% formamide, and washing at 50-65° C. in 0.5× SSC), sequences having regions which are greater than 90% homologous to the probe can be obtained, and that by employing lower stringency conditions (e.g., hybridizing at 35-37° C. in 5× SSC and 40-45% formamide, and washing at 42° C. in SSC), sequences having regions which are greater than 35-45% homologous to the probe will be obtained.

[0122] Any organism can be used as the source for homologs of the present invention so long as the organism naturally expresses such a protein or contains genes encoding the same. The most preferred organism for isolating homologs are bacteria which are closely related to Mycoplasma genitalium.

[0123] Uses for the Compositions of the Invention

[0124] Each ORF provided in Table 1(a), 1(b) and 1(c) was assigned to biological role categories adapted from Riley, M., Microbiology Reviews 57(4):862 (1993)). This allows the skilled artisan to determine a use for each identified coding sequence. Tables 1(a), 1(b) and 1(c) further provides an identification of the type of polypeptide which is encoded for by each ORF. As a result, one skilled in the art can use the polypeptides of the present invention for commercial, therapeutic and industrial purposes consistent with the type of putative identification of the polypeptide.

[0125] Such identifications permit one skilled in the art to use the Mycoplasma genitalium ORFs in a manner similar to the known type of sequences for which the identification is made; for example, to ferment a particular sugar source or to produce a particular metabolite. (For a review of enzymes used within the commercial industry, see Biochemical Engineering and Biotechnology Handbook 2nd, eds. Macmillan Publ. Ltd., NY (1991) and Biocatalysts in Organic Syntheses, ed. J. Tramper et al., Elsevier Science Publishers, Amsterdam, The Netherlands (1985)).

[0126] 1. Biosynthetic Enzymes

[0127] Open reading frames encoding proteins involved in mediating the catalytic reactions involved in intermediary and macromolecular metabolism, the biosynthesis of small molecules, cellular processes and other functions includes enzymes involved in the degradation of the intermediary products of metabolism, enzymes involved in central intermediary metabolism, enzymes involved in respiration, both aerobic and anaerobic, enzymes involved in fermentation, enzymes involved in ATP proton motor force conversion, enzymes involved in broad regulatory function, enzymes involved in amino acid synthesis, enzymes involved in nucleotide synthesis, enzymes involved in cofactor and vitamin synthesis, can be used for industrial biosynthesis. The various metabolic pathways present in Mycoplasma can be identified based on absolute nutritional requirements as well as by examining the various enzymes identified in Table 1(a), 1(b) and 1(c).

[0128] Identified within the category of intermediary metabolism, a number of the proteins encoded by the identified ORFs in Tables 1(a), 1(b) and 1(c) are particularly involved in the degradation of intermediary metabolites as well as non-macromolecular metabolism. Some of the enzymes identified include amylases, glucose oxidases, and catalase.

[0129] Proteolytic enzymes are another class of commercially important enzymes. Proteolytic enzymes find use in a number of industrial processes including the processing of flax and other vegetable fibers, in the extraction, clarification and depectinization of fruit juices, in the extraction of vegetables' oil and in the maceration of fruits and vegetables to give unicellular fruits. A detailed review of the proteolytic enzymes used in the food industry is provided by Rombouts et al., Symbiosis 21:79 (1986) and Voragen et al. in Biocatalyst in Agricultural Biotechnology, edited J. R. Whitaker et al., American Chemical Society Symposium Series 389:93 (1989)).

[0130] The metabolism of glucose, galactose, fructose and xylose are important parts of the primary metabolism of Mycoplasma. Enzymes involved in the degradation of these sugars can be used in industrial fermentation. Some of the important sugar transforming enzymes, from a commercial viewpoint, include sugar isomerases such as glucose isomerase. Other metabolic enzymes have found commercial use such as glucose oxidases which produces ketogulonic acid (KGA). KGA is an intermediate in the commercial production of ascorbic acid using the Reichstein's procedure (see Krueger et al., Biotechnology 6(A), Rhine, H. J. et al., eds., Verlag Press, Weinheim, Germany (1984)).

[0131] Glucose oxidase (GOD) is commercially available and has been used in purified form as well as in an immobilized form for the deoxygenation of beer. See Hartmeir et al., Biotechnology Letters 1:21 (1979). The most important application of GOD is the industrial scale fermentation of gluconic acid. Market for gluconic acids which are used in the detergent, textile, leather, photographic, pharmaceutical, food, feed and concrete industry (see Bigelis in Gene Manipulations and Fungi, Benett, J. W. et al., eds., Academic Press, New York (1985), p. 357). In addition to industrial applications, GOD has found applications in medicine for quantitative determination of glucose in body fluids recently in biotechnology for analyzing syrups from starch and cellulose hydrosylates. See Owusu et al., Biochem. et Biophysica. Acta. 872:83 (1986).

[0132] The main sweetener used in the world today is sugar which comes from sugar beets and sugar cane. In the field of industrial enzymes, the glucose isomerase process shows the largest expansion in the market today. Initially, soluble enzymes were used and later immobilized enzymes were developed (Krueger et al., Biotechnology, The Textbook of Industrial Microbiology, Sinauer Associated Incorporated, Sunderland, Mass. (1990)). Today, the use of glucose-produced high fructose syrups is by far the largest industrial business using immobilized enzymes. A review of the industrial use of these enzymes is provided by Jorgensen, Starch 40:307 (1988).

[0133] Proteinases, such as alkaline serine proteinases, are used as detergent additives and thus represent one of the largest volumes of microbial enzymes used in the industrial sector. Because of their industrial importance, there is a large body of published and unpublished information regarding the use of these enzymes in industrial processes. (See Faultman et al., Acid Proteases Structure Function and Biology, Tang, J., ed., Plenum Press, New York (1977) and Godfrey et al., Industrial Enzymes, MacMillan Publishers, Surrey, UK (1983) and Hepner et al., Report Industrial Enzymes by 1990, Hel Hepner & Associates, London (1986)).

[0134] Another class of commercially usable proteins of the present invention are the microbial lipases identified in Tables 1(a), 1(b) and 1(c) (see Macrae et al., Philosophical Transactions of the Chiral Society of London 310:227 (1985) and Poserke, Journal of the American Oil Chemist Society 61:1758 (1984). A major use of lipases is in the fat and oil industry for the production of neutral glycerides using lipase catalyzed inter-esterification of readily available triglycerides. Application of lipases include the use as a detergent additive to facilitate the removal of fats from fabrics in the course of the washing procedures.

[0135] The use of enzymes, and in particular microbial enzymes, as catalyst for key steps in the synthesis of complex organic molecules is gaining popularity at a great rate. One area of great interest is the preparation of chiral intermediates. Preparation of chiral intermediates is of interest to a wide range of synthetic chemists particularly those scientists involved with the preparation of new pharmaceuticals, agrochemicals, fragrances and flavors. (See Davies et al., Recent Advances in the Generation of Chiral Intermediates Using Enzymes, CRC Press, Boca Raton, Fla. (1990)). The following reactions catalyzed by enzymes are of interest to organic chemists: hydrolysis of carboxylic acid esters, phosphate esters, amides and nitrites, esterification reactions, transesterification reactions, synthesis of amides, reduction of alkanones and oxoalkanates, oxidation of alcohols to carbonyl compounds, oxidation of sulfides to sulfoxides, and carbon bond forming reactions such as the aldol reaction.

[0136] When considering the use of an enzyme encoded by one of the ORFs of the present invention for biotransformation and organic synthesis it is sometimes necessary to consider the respective advantages and disadvantages of using a microorganism as opposed to an isolated enzyme. Pros and cons of using a whole cell system on the one hand or an isolated partially purified enzyme on the other hand, has been described in detail by Bud et al., Chemistry in Britain (1987), p. 127.

[0137] Amino transferases, enzymes involved in the biosynthesis and metabolism of amino acids, are useful in the catalytic production of amino acids. The advantages of using microbial based enzyme systems is that the amino transferase enzymes catalyze the stereo-selective synthesis of only l-amino acids and generally possess uniformly high catalytic rates. A description of the use of amino transferases for amino acid production is provided by Roselle-David, Methods of Enzymology 136:479 (1987).

[0138] 2. Generation of Antibodies

[0139] As described here, the proteins of the present invention, as well as homologs thereof, can be used in a variety procedures and methods known in the art which are currently applied to other proteins. The proteins of the present invention can further be used to generate an antibody which selectively binds the protein. Such antibodies can be either monoclonal or polyclonal antibodies, as well fragments of these antibodies, and humanized forms.

[0140] The invention further provides antibodies which selectively bind to one of the proteins of the present invention and hybridomas which produce these antibodies. A hybridoma is an immortalized cell line which is capable of secreting a specific monoclonal antibody.

[0141] In general, techniques for preparing polyclonal and monoclonal antibodies as well as hybridomas capable of producing the desired antibody are well known in the art (Campbell, A. M., Monoclonal Antibody Technology: Laboratory Techniques in Biochemistry and Molecular Biology, Elsevier Science Publishers, Amsterdam, The Netherlands (1984); St. Groth et al., J. Immunol. Methods 35:1-21 (1980); Kohler and Milstein, Nature 256:495-497 (1975)), the trioma technique, the human B-cell hybridoma technique (Kozbor et al., Immunology Today 4:72 (1983); Cole et al., in Monoclonal Antibodies and Cancer Therapy, Alan R. Liss, Inc. (1985), pp. 77-96).

[0142] Any animal (mouse, rabbit, etc.) which is known to produce antibodies can be immunized with the pseudogene polypeptide. Methods for immunization are well known in the art. Such methods include subcutaneous or interperitoneal injection of the polypeptide. One skilled in the art will recognize that the amount of the protein encoded by the ORF of the present invention used for immunization will vary based on the animal which is immunized, the antigenicity of the peptide and the site of injection.

[0143] The protein which is used as an immunogen may be modified or administered in an adjuvant in order to increase the protein's antigenicity. Methods of increasing the antigenicity of a protein are well known in the art and include, but are not limited to coupling the antigen with a heterologous protein (such as globulin or β-galactosidase) or through the inclusion of an adjuvant during immunization.

[0144] For monoclonal antibodies, spleen cells from the immunized animals are removed, fused with myeloma cells, such as SP2/0-Ag14 .myeloma cells, and allowed to become monoclonal antibody producing hybridoma cells.

[0145] Any one of a number of methods well known in the art can be used to identify the hybridoma cell which produces an antibody with the desired characteristics. These include screening the hybridomas with an ELISA assay, western blot analysis, or radioimmunoassay (Lutz et al., Exp. Cell Res. 175:109-124 (1988)).

[0146] Hybridomas secreting the desired antibodies are cloned and the class and subclass is determined using procedures known in the art (Campbell, A. M., Monoclonal Antibody Technology: Laboratory Techniques in Biochemistry and Molecular Biology, Elsevier Science Publishers, Amsterdam, The Netherlands (1984)).

[0147] Techniques described for the production of single chain antibodies (U.S. Pat. No. 4,946,778) can be adapted to produce single chain antibodies to proteins of the present invention.

[0148] For polyclonal antibodies, antibody containing antisera is isolated from the immunized animal and is screened for the presence of antibodies with the desired specificity using one of the above-described procedures.

[0149] The present invention further provides the above-described antibodies in detectably labeled form. Antibodies can be detectably labeled through the use of radioisotopes, affinity labels (such as biotin, avidin, etc.), enzymatic labels (such as horseradish peroxidase, alkaline phosphatase, etc.) fluorescent labels (such as FITC or rhodamine, etc.), paramagnetic atoms, etc. Procedures for accomplishing such labeling are well-known in the art, for example see (Stemberger, L. A. et al., J. Histochem. Cytochem. 18:315 (1970); Bayer, E. A. et al., Meth. Enzym. 62:308 (1979); Engval, E. et al., Immunol. 109:129 (1972); Goding, J. W. J. Immunol. Meth. 13:215 (1976)).

[0150] The labeled antibodies of the present invention can be used for in vitro, in vivo, and in situ assays to identify cells or tissues in which a fragment of the Mycoplasma genitalium genome is expressed.

[0151] The present invention further provides the above-described antibodies immobilized on a solid support. Examples of such solid supports include plastics such as polycarbonate, complex carbohydrates such as agarose and sepharose, acrylic resins and such as polyacrylamide and latex beads. Techniques for coupling antibodies to such solid supports are well known in the art (Weir, D. M. et al., “Handbook of Experimental Immunology” 4th Ed., Blackwell Scientific Publications, Oxford, England, Chapter 10 (1986); Jacoby, W. D. et al., Meth. Enzym. 34 Academic Press, N.Y. (1974)). The immobilized antibodies of the present invention can be used for in vitro, in vivo, and in situ assays as well as for immunoaffinity purification of the proteins of the present invention.

[0152] 3. Diagnostic Assays and Kits

[0153] The present invention further provides methods to identify the expression of one of the ORFs of the present invention, or homolog thereof, in a test sample, using one of the DFs or antibodies of the present invention.

[0154] In detail, such methods comprise incubating a test sample with one or more of the antibodies or one or more of the DFs of the present invention and assaying for binding of the DFs or antibodies to components within the test sample.

[0155] Conditions for incubating a DF or antibody with a test sample vary. Incubation conditions depend on the format employed in the assay, the detection methods employed, and the type and nature of the DF or antibody used in the assay. One skilled in the art will recognize that any one of the commonly available hybridization, amplification or immunological assay formats can readily be adapted to employ the DFs or antibodies of the present invention. Examples of such assays can be found in Chard, T., An Introduction to Radioimmunoassay and Related Techniques, Elsevier Science Publishers, Amsterdam, The Netherlands (1986); Bullock, G. R. et al., Techniques in Immunocytochemistry, Academic Press, Orlando, Fla. Vol. 1 (1982), Vol. 2 (1983), Vol. 3 (1985); Tijssen, P., Practice and Theory of Enzyme Immunoassays: Laboratory Techniques in Biochemistry and Molecular Biology, Elsevier Science Publishers, Amsterdam, The Netherlands (1985).

[0156] The test samples of the present invention include cells, protein or membrane extracts of cells, or biological fluids such as sputum, blood, serum, plasma, or urine. The test sample used in the above-described method will vary based on the assay format, nature of the detection method and the tissues, cells or extracts used as the sample to be assayed. Methods for preparing protein extracts or membrane extracts of cells are well known in the art and can be readily be adapted in order to obtain a sample which is compatible with the system utilized.

[0157] In another embodiment of the present invention, kits are provided which contain the necessary reagents to carry out the assays of the present invention.

[0158] Specifically, the invention provides a compartmentalized kit to receive, in close confinement, one or more containers which comprises: (a) a first container comprising one of the DFs or antibodies of the present invention; and (b) one or more other containers comprising one or more of the following: wash reagents, reagents capable of detecting presence of a bound DF or antibody.

[0159] In detail, a compartmentalized kit includes any kit in which reagents are contained in separate containers. Such containers include small glass containers, plastic containers or strips of plastic or paper. Such containers allows one to efficiently transfer reagents from one compartment to another compartment such that the samples and reagents are not cross-contaminated, and the agents or solutions of each container can be added in a quantitative fashion from one compartment to another. Such containers will include a container which will accept the test sample, a container which contains the antibodies used in the assay, containers which contain wash reagents (such as phosphate buffered saline, Tris-buffers, etc.), and containers which contain the reagents used to detect the bound antibody or DF.

[0160] Types of detection reagents include labeled nucleic acid probes, labeled secondary antibodies, or in the alternative, if the primary antibody is labeled, the enzymatic, or antibody binding reagents which are capable of reacting with the labeled antibody. One skilled in the art will readily recognize that the disclosed DFs and antibodies of the present invention can be readily incorporated into one of the established kit formats which are well known in the art.

[0161] 4. Screening Assay for Binding Agents

[0162] Using the isolated proteins of the present invention, the present invention further provides methods of obtaining and identifying agents which bind to a protein encoded by one of the ORFs of the present invention or to one of the fragments and the Mycoplasma genome herein described.

[0163] In detail, said method comprises the steps of:

[0164] (a) contacting an agent with an isolated protein encoded by one of the ORFs of the present invention, or an isolated fragment of the Mycoplasma genome; and

[0165] (b) determining whether the agent binds to said protein or said fragment.

[0166] The agents screened in the above assay can be, but are not limited to, peptides, carbohydrates, vitamin derivatives, or other pharmaceutical agents. The agents can be selected and screened at random or rationally selected or designed using protein modeling techniques.

[0167] For random screening, agents such as peptides, carbohydrates, pharmaceutical agents and the like are selected at random and are assayed for their ability to bind to the protein encoded by the ORF of the present invention.

[0168] Alternatively, agents may be rationally selected or designed. As used herein, an agent is said to be “rationally selected or designed” when the agent is chosen based on the configuration of the particular protein. For example, one skilled in the art can readily adapt currently available procedures to generate peptides, pharmaceutical agents and the like capable of binding to a specific peptide sequence in order to generate rationally designed antipeptide peptides, for example see Hurby et al., “Application of Synthetic Peptides: Antisense Peptides,” In Synthetic Peptides, A User's Guide, W. H. Freeman, NY (1992), pp. 289-307, and Kaspezak et al., Biochemistry 28:9230-8 (1989), or pharmaceutical agents, or the like.

[0169] In addition to the foregoing, one class of agents of the present invention, as broadly described, can be used to control gene expression through binding to one of the ORFs or EMFs of the present invention. As described above, such agents can be randomly screened or rationally designed/selected. Targeting the ORF or EMF allows a skilled artisan to design sequence specific or element specific agents, modulating the expression of either a single ORF or multiple ORFs which rely on the same EMF for expression control.

[0170] One class of DNA binding agents are agents which contain base residues which hybridize or form a triple helix formation by binding to DNA or RNA. Such agents can be based on the classic phosphodiester, ribonucleic acid backbone, or can be a variety of sulfhydryl or polymeric derivatives which have base attachment capacity.

[0171] Agents suitable for use in these methods usually contain 20 to 40 bases and are designed to be complementary to a region of the gene involved in transcription (triple helix—see Lee et al., Nucl. Acids Res. 6:3073 (1979); Cooney et al., Science 241:456 (1988); and Dervan et al., Science 251: 1360 (1991)) or to the MRNA itself (antisense—Okano, J. Neurochem. 56:560 (1991); Oligodeoxynucleotides as Antisense Inhibitors of Gene Expression, CRC Press, Boca Raton, Fla. (1988)). Triple helix-formation optimally results in a shut-off of RNA transcription from DNA, while antisense RNA hybridization blocks translation of an mRNA molecule into polypeptide. Both techniques have been demonstrated to be effective in model systems. Information contained in the sequences of the present invention is necessary for the design of an antisense or triple helix oligonucleotide and other DNA binding agents.

[0172] Agents which bind to a protein encoded by one of the ORFs of the present invention can be used as a diagnostic agent, in the control of bacterial infection by modulating the activity of the protein encoded by the ORF. Agents which bind to a protein encoded by one of the ORFs of the present invention can be formulated using known techniques to generate a pharmaceutical composition for use in controlling Mycoplasma growth and infection.

[0173] 5. Vaccine and Pharmaceutical Composition

[0174] The present invention further provides pharmaceutical agents which can be used to modulate the growth of Mycoplasma genitalium, or another related organism, in vivo or in vitro. As used herein, a “pharmaceutical agent” is defined as a composition of matter which can be formulated using known techniques to provide a pharmaceutical compositions. As used herein, the “pharmaceutical agents of the present invention” refers the pharmaceutical agents which are derived from the proteins encoded by the ORFs of the present invention or are agents which are identified using the herein described assays.

[0175] As used herein, a pharmaceutical agent is said to “modulated the growth of Mycoplasma sp., or a related organism, in vivo or in vitro,” when the agent reduces the rate of growth, rate of division, or viability of the organism in question. The pharmaceutical agents of the present invention can modulate the growth of an organism in many fashions, although an understanding of the underlying mechanism of action is not needed to practice the use of the pharmaceutical agents of the present invention. Some agents will modulate the growth by binding to an important protein thus blocking the biological activity of the protein, while other agents may bind to a component of the outer surface of the organism blocking attachment or rendering the organism more prone to act the bodies nature immune system. Alternatively, the agent may be comprise a protein encoded by one of the ORFs of the present invention and serve as a vaccine. The development and use of a vaccine based on outer membrane components, such as the LPS, are well known in the art.

[0176] As used herein, a “related organism” is a broad term which refers to any organism whose growth can be modulated by one of the pharmaceutical agents of the present invention. In general, such an organism will contain a homolog of the protein which is the target of the pharmaceutical agent or the protein used as a vaccine. As such, related organism do not need to be bacterial but may be fungal or viral pathogens.

[0177] The pharmaceutical agents and compositions of the present invention may be administered in a convenient manner such as by the oral, topical, intravenous, intraperitoneal, intramuscular, subcutaneous, intranasal or intradermal routes. The pharmaceutical compositions are administered in an amount which is effective for treating and/or prophylaxis of the specific indication. In general, they are administered in an amount of at least about 10 μg/kg body weight and in most cases they will be administered in an amount not in excess of about 8 mg/Kg body weight per day. In most cases, the dosage is from about 10 μg/kg to about 1 mg/kg body weight daily, taking into account the routes of administration, symptoms, etc.

[0178] The agents of the present invention can be used in native form or can be modified to form a chemical derivative. As used herein, a molecule is said to be a “chemical derivative” of another molecule when it contains additional chemical moieties not normally a part of the molecule. Such moieties may improve the molecule's solubility, absorption, biological half life, etc. The moieties may alternatively decrease the toxicity of the molecule, eliminate or attenuate any undesirable side effect of the molecule, etc. Moieties capable of mediating such effects are disclosed in Remington's Pharmaceutical Sciences (1980).

[0179] For example, a change in the immunological character of the functional derivative, such as affinity for a given antibody, is measured by a competitive type immunoassay. Changes in immunomodulation activity are measured by the appropriate assay. Modifications of such protein properties as redox or thermal stability, biological half-life, hydrophobicity, susceptibility to proteolytic degradation or the tendency to aggregate with carriers or into multimers are assayed by methods well known to the ordinarily skilled artisan.

[0180] The therapeutic effects of the agents of the present invention may be obtained by providing the agent to a patient by any suitable means (i.e., inhalation, intravenously, intramuscularly, subcutaneously, enterally, or parenterally). It is preferred to administer the agent of the present invention so as to achieve an effective concentration within the blood or tissue in which the growth of the organism is to be controlled.

[0181] To achieve an effective blood concentration, the preferred method is to administer the agent by injection. The administration may be by continuous infusion, or by single or multiple injections.

[0182] In providing a patient with one of the agents of the present invention, the dosage of the administered agent will vary depending upon such factors as the patient's age, weight, height, sex, general medical condition, previous medical history, etc. In general, it is desirable to provide the recipient with a dosage of agent which is in the range of from about 1 pg/kg to 10 mg/kg (body weight of patient), although a lower or higher dosage may be administered. The therapeutically effective dose can be lowered by using combinations of the agents of the present invention or another agent.

[0183] As used herein, two or more compounds or agents are said to be administered “in combination” with each other when either (1) the physiological effects of each compound, or (2) the serum concentrations of each compound can be measured at the same time. The composition of the present invention can be administered concurrently with, prior to, or following the administration of the other agent.

[0184] The agents of the present invention are intended to be provided to recipient subjects in an amount sufficient to decrease the rate of growth (as defined above) of the target organism.

[0185] The administration of the agent(s) of the invention may be for either a “prophylactic” or “therapeutic” purpose. When provided prophylactically, the agent(s) are provided in advance of any symptoms indicative of the organisms growth. The prophylactic administration of the agent(s) serves to prevent, attenuate, or decrease the rate of onset of any subsequent infection. When provided therapeutically, the agent(s) are provided at (or shortly after) the onset of an indication of infection. The therapeutic administration of the compound(s) serves to attenuate the pathological symptoms of the infection and to increase the rate of recovery.

[0186] The agents of the present invention are administered to the mammal in a pharmaceutically acceptable form and in a therapeutically effective concentration. A composition is said to be “pharmacologically acceptable” if its administration can be tolerated by a recipient patient. Such an agent is said to be administered in a “therapeutically effective amount” if the amount administered is physiologically significant. An agent is physiologically significant if its presence results in a detectable change in the physiology of a recipient patient.

[0187] The agents of the present invention can be formulated according to known methods to prepare pharmaceutically useful compositions, whereby these materials, or their functional derivatives, are combined in admixture with a pharmaceutically acceptable carrier vehicle. Suitable vehicles and their formulation, inclusive of other human proteins, e.g., human serum albumin, are described, for example, in Remington's Pharmaceutical Sciences (16th ed., Osol, A., Ed., Mack, Easton Pa. (1980)). In order to form a pharmaceutically acceptable composition suitable for effective administration, such compositions will contain an effective amount of one or more of the agents of the present invention, together with a suitable amount of carrier vehicle.

[0188] Additional pharmaceutical methods may be employed to control the duration of action. Control release preparations may be achieved through the use of polymers to complex or absorb one or more of the agents of the present invention. The controlled delivery may be exercised by selecting appropriate macromolecules (for example polyesters, polyamino acids, polyvinyl, pyrrolidone, ethylenevinylacetate, methylcellulose, carboxymethylcellulose, or protamine, sulfate) and the concentration of macromolecules as well as the methods of incorporation in order to control release. Another possible method to control the duration of action by controlled release preparations is to incorporate agents of the present invention into particles of a polymeric material such as polyesters, polyamino acids, hydrogels, poly(lactic acid) or ethylene vinylacetate copolymers. Alternatively, instead of incorporating these agents into polymeric particles, it is possible to entrap these materials in microcapsules prepared, for example, by coacervation techniques or by interfacial polymerization, for example, hydroxymethylcellulose or gelatine-microcapsules and poly(methylmethacylate) microcapsules, respectively, or in colloidal drug delivery systems, for example, liposomes, albumin microspheres, microemulsions, nanoparticles, and nanocapsules or in macroemulsions. Such techniques are disclosed in Remington's Pharmaceutical Sciences (1980).

[0189] The invention further provides a pharmaceutical pack or kit comprising one or more containers filled with one or more of the ingredients of the pharmaceutical compositions of the invention. Associated with such container(s) can be a notice in the form prescribed by a governmental agency regulating the manufacture, use or sale of pharmaceuticals or biological products, which notice reflects approval by the agency of manufacture, use or sale for human administration. In addition, the agents of the present invention may be employed in conjunction with other therapeutic compounds.

### EXPERIMENTAL

### EXAMPLE 1

[0190] Overview of Experimental Design and Methods

[0191] 1. Shotgun Sequencing Strategy

[0192] The overall strategy for a shotgun approach to whole genome sequencing is outlined in Table 3. The theory of shotgun sequencing follows from the application of the equation for the Poisson distribution pₓ=m^{x}e/x!, where x is the number of occurrences of an event and m is the mean number of occurrences. To determine the probability that any given base is not sequenced after a certain amount of random sequence has been generated, if L is the genome length, n is the number of clone insert ends sequenced, and w is the sequencing read length, then m=nw/L, and the probability that no clone originates at any of the w bases preceding a given base, i.e., the probability that the base is not sequenced, id p₀=e^{-m}. Using the fold coverage as the unit form, one sees that after 580 kb of sequence has been randomly generated, m=1, representing 1× coverage. In this case, p₀=e⁻¹=37, thus approximately 37% is unsequenced. A 5× coverage (approximately 3150 clones sequenced from both insert ends) yields p₀=e⁻⁵=0.0067, or 0.67% unsequenced. The total gap length is Le^{-m} and the average gap size is L/n. 5×coverage would leave about 48 gaps averaging about 80 bp in size. The treatment is essentially that of Lander and Waterman. Table 4 illustrates a computer simulation of a random sequencing experiment for coverage of a 580 kb genome with an average fragment size of 400 bp.

[0193] 2. Random Library Construction

[0194] In order to approximate the random model described above during actual sequencing, a nearly ideal library of cloned genomic fragment is required. M. genitalium genomic chromosomal DNA was mechanically sheared, digested with BAL31 nuclease to produce blunt-ends, and size-fractionated by agarose gel electrophoresis. Fragments in the 2.0 kb size range were excised and recovered. These fragments were ligated to SmaI-cut, phophatased pUC18 vector and the ligated products were fractionated on an agarose gel. The linear vector plus insert band was excised and recovered. The ends of the linear recombinant molecules were repaired with T4 polymerase treatment and the molecules were then ligated into circles. This two-stage procedure resulted in a molecularly random collection of single-insert plasmid recombinants with minimal contamination from double-insert plasmid recombinants with minimal contamination from double-insert chimeras (<1%) or free vector (<1%). Deviation from randomness is most likely to occur during cloning. E. coli host cells deficient in all recombinant and restriction functions were used to prevent rearrangements, deletions, and loss of clones by restriction. Transformed cells were plated directly on antibiotic diffusion plates to avoid the usual broth recovery phase which allows multiplication and selection of the most rapidly growing cells. All colonies were picked for template preparation regardless of size. Only clones lost due to “poison” DNA or deleterious gene products would be deleted from the library, resulting in a slight increase in gap number over that expected.

[0195] In order to evaluate the quality of the M. genitalium random insert library, sequence data was obtained from approximately 2000 templates using the M13F primer. The random sequence fragments were assembled using The Institute for Genomic Research (TIGR) autoassembler software after obtaining 500, 1000, 1500, and 2000 sequence fragments, and the number of unique assembled base pairs was determined. The progression of assembly was plotted using the actual data obtained from the assembly of up to 2000 sequence fragments and compared the data that is provided in the ideal plot. There was essentially no deviation of the actual assembly data from the ideal plot, indicating that we had constructed close to an ideal random library with minimal contamination from double insert chimeras and free of vector.

[0196] 3. Random DNA Sequencing

[0197] Five-thousand seven hundred and sixty (5,760) plasmid templates were prepared using a “boiler bead” preparation method developed in collaboration with AGTC (Gaithersburg, Md.), as suggested by the manufacturer. The AGTC method is performed in a 96-well format for all stages of DNA preparation from bacterial growth through final DNA purification. Template concentration was determined using Hoechst Dye and a Millipore Cytofluor. DNA concentrations were not adjusted and low-yielding templates were identified and not sequenced where possible. Sequencing reactions were carried out on plasmid templates using the AB Catalyst Lab station or Perkin-Elmer 9600 Thermocyclers with Applied Biosystems PRISM Ready Reaction Dye Primer Cycle Sequencing Kits for the M13 forward (−21M13) and the M13 reverse (RP1) primers. Dye terminator sequencing reactions were carried out on the lambda templates on a Perkin-Elmer 9600 Thermocyler using the Applied Biosystems Ready Reaction Dye Terminator Cycle Sequencing kits. Nine-thousand eight hundred and forty-six (9,846) sequencing reactions were performed during the random phase of the project by 4 individuals using an average of 10 AB373 DNA Sequencers over a 2 month period. All sequencing reactions were analyzed using the Stretch modification of the AB373, primarily using a 36cm well-to-read distance. The overall sequencing success rate for M13-21 sequences was 88% and 84% for M13RP1 sequences. The average usable read length for M13-21 sequences was 485 and 441 for M13RP1 sequences.

[0198] The art has described the value of using sequence from both ends of sequencing templates to facilitate ordering of contigs in shotgun assembly projects. A skilled artisan must balance the desirability of both-end sequencing (including the reduced cost of lower total number of templates) against shorter read-lengths and lower success rates for sequencing reactions performed with the M13RP1 (reverse) primer compared to the M13-21 (forward) primer. For this project, essentially all of the templates were sequenced from both ends.

[0199] 4. Protocol for Automated Cycle Sequencing

[0200] The sequencing consisted of using five (5) ABI Catalyst robots and ten (10) ABI 373 Automated DNA Sequencers. The Catalyst robot is a publicly available sophisticated pipetting and temperature control robot which has been developed specifically for DNA sequencing reactions. The Catalyst combines pre-aliquoted templates and reaction mixes consisting of deoxy- and dideoxynucleotides, the Taq thermostable DNA polymerase, fluorescently-labeled sequencing primers, and reaction buffer. Reaction mixes and templates were combined in the wells of an aluminum 96-well thermocycling plate. Thirty consecutive cycles of linear amplification (e.g., one primer synthesis) steps were performed including denaturation, annealing of primer and template, and extension of DNA synthesis. A heated lid with rubber gaskets on the thermocycling plate.prevented evaporation without the need for an oil overlay.

[0201] Two sequencing protocols were used: dye-labeled primers and dye-labeled dideoxy chain terminators. The shotgun sequencing involves use of four dye-labeled sequencing primers, one for each of the four terminator nucleotide. Each dye-primer is labeled with a different fluorescent dye, permitting the four individual reactions to be combined into one lane of the 373 DNA Sequencer for electrophoresis, detection, and base-calling. ABI currently supplies pre-mixed reaction mixes in bulk packages containing all the necessary non-template reagents for sequencing. Sequencing can be done with both plasmid and PCR-generated templates with both dye-primers and dye-terminators with approximately equal fidelity, although plasmid templates generally give longer usable sequences.

[0202] Thirty-two reactions were loaded per 373 Sequencer each day, for a total of 960 samples. Electrophoresis was run overnight following the manufacture's protocols, and the data was collected for twelve hours. Following electrophoresis and fluorescence detection, the ABI 373 performs automatic lane tracking and base-calling. The lane-tracking was confirmed visually. Each sequence electropherogram (or fluorescence lane trace) was inspected visually and assessed for quality. Trailing sequences of low quality were removed and the sequence itself was loaded via software a Sybase database (archived daily to a 8 mm tape). Leading vector polylinker sequence was removed automatically by software program. The average edited lengths of sequences from the ABI 373 Sequencers converted to Stretch Liners were approximately 460 bp.

[0203] Informatics

[0204] 1. Data Management

[0205] A number of information management systems (LIMS) for a large-scale sequencing lab have been developed. A system was used which allowed an automated data flow wherever possible to reduce user error. The system used to collect and assemble the sequence information obtained is centered upon a relational data management system built using the Sybase RDBMS. The database is designed to store and correlate all information collected during the entire operation from template preparation to final analysis of the genome. Because the raw output of the AB 373 Sequencers is based on a Macintosh platform and the data management system chosen is based on a Unix platform, it was necessary to design and implement a variety of multi-user, client server applications which allow the raw data as well as analysis results to flow seamlessly into the database with a minimum of user effort.

[0206] 2. Assembly

[0207] The sequence data from 8,472 sequence fragments was used to assemble the M. genitalium genome. The assembly was performed by using a new assembly engine (TIGR Assembler—previously designated ASMG) developed at TIGR. The TIGR Assembler simultaneously clusters and assembles fragments of the genome. In order to obtain the necessary speed, the TIGR Assembler builds a hash table of 10 bp oligonucleotide subsequences to generate a list of potential sequence fragment. The number of potential overlaps for each fragment determines which fragments are likely to fall into repetitive elements. Beginning with a single seed sequence fragment, the TIGR Assembler extends the current contig by attempting to add the best matching fragment based on oligonucleotide content. The current contig and candidate fragment are aligned using a modified version of the Smith-Waterman algorithm which provides for optimal gap alignments. The current contig is extended by the fragment only if strict criteria for the quality of the match are met. The match criteria include the minimum length of overlap, the maximum length of an unmatched end, and the minimum percentage match. These criteria are automatically lowered by the TIGR Assembler in regions of minimal coverage and raised in regions with a good chance of containing repetitive elements. Potentially chimeric fragments and fragments representing the boundaries of repetitive elements are often rejected based on partial mismatches at the ends of alignments and excluded from the current contig. The TIGR Assembler is designed to take advantage of clone size information coupled with sequencing from both ends of each template. The TIGR Assembler enforces the constraint that sequence fragments from two ends of the same template point toward one another in the contig and are located within a certain range of base pairs (definable for each clone based on the known clone size range for a given library). Assembly of the 8,472 sequence fragments of M. genitalium required 10 hours of CPU time on a SPARCenter 2000. All contigs were loaded into a Sybase structure representing the location of each fragment in the contig and extensive information about the consensus sequence itself. The result of this process was approximately 40 contigs ordered into 2 groups (See below). Because of the high stringency of the TIGR Assembler process it was found to be useful to perform a FASTA (GRASTA) alignment of all contigs built by the TIGR Assembler process against each other. In this way additional overlaps were detected which enabled compression of the data set into 26 contigs in 2 groups.

[0208] Achieving Closure

[0209] The complete genome sequence was obtained by sequencing across the gaps between contigs. While gap filling has occupied a major portion of the time and expense of other genome sequencing projects, it was minimal in the present invention. This was primarily due to 1) saturation of the genome as a result of the number of random clones and sequencing reactions performed, 2) the longer read lengths obtained from the Stretch Liners, 3) the anchored ends which were obtain for joining contigs, and 4) the overall capacity and efficiency of the high throughput sequencing facility.

[0210] Gaps occurred on a predicted random basis, as shown in Table 4, which illustrates simulated random sequencing. These gaps generally were less than 200 bp in size. All of the gaps were closed by sequencing further on the templates bordering the gaps. In these cases, oligo primers for extension of the sequence from both ends of the gap were generated using techniques known in the art. This gave a double standard coverage across the gap areas.

[0211] The high redundancy of sequence information that was obtained from the shotgun approach gave a highly accurate sequence. Our sequence accuracy was confirmed by comparing the sequence information obtained against known M. genitalium genes present in the GenBank database. The accuracy of our chromosome structure was confirmed by comparison of restriction digests to the known restriction map of IM. genitalium. The EcoRI restriction map of M. genitalium is shown in FIG. 1 and expressed in tabular form in Table 5.

[0212] Identifying Genes

[0213] M. genitalium ORFs were initially defined by evaluating their coding potential with the program GeneWorks using composition matrices specific to Mycoplasma genomic DNA. The ORF sequences (plus 300 bp of flanking sequence) were used in searches against a database of non-redundant bacterial proteins (NRBP). Redundancy was removed from NRBP at two stages. (1) All DNA coding sequences were extracted from GenBank (release 85), and sequences from the same species were searched against each other. Sequences having >97% similarity over regions >100 nucleotides were combined. (2) The sequences were translated and used to protein comparisons with all sequences in Swiss-Prot (release 30). Sequences belonging to the same species and having >98% similarity over 33 amino acids were combined. NRBP is composed of 21445 sequences from 23751 GenBank sequences and 11183 Swiss-Prot sequences from 1099 different species.

[0214] Searches were performed using an algorithm that (1) translates the query DNA sequence in all six reading frames for searching against a protein database, (2) identifies the protein sequences that match the query, and (3) aligns the protein-protein matches using a modified Smith-Waterman algorithm. In cases where insertion or deletions in the DNA sequence produced a frame shift error, the alignment algorithm started with protein regions of maximum similarity and extended the alignment to the same database match using the 300 bp flanking region. Regions known to contain frame shift errors were saved to the database and evaluated for possible correction. The role categories were adopted from those previously defined by Riley et al. for E. coli gene products. Role assignments were made to M. genitalium ORFS at the protein sequence level by linking the protein sequence of the ORFS with the Swiss-Prot sequences in the Riley database.

[0215] Detailed Description of Sequencing the Mycoplasma genitalium Genome, Genome Analysis and Comparative Genomics

[0216] We have determined the complete nucleotide sequence (580,071 bp) of the Mycoplasma genitalium genome using the approach of whole chromosome shotgun sequencing and assembly, which has successfully been applied to the analysis of the Haemophilus influenzae genome (R. Fleischmann et al., Science 269:496 (1995)). These data, together with the description of the complete genome sequence (1.83 Mb) of the eubacterium Haemophilus influenzae, have provided the opportunity for comparative genomics on a whole genome level for the first time. Our initial whole genome comparisons reveal fundamental differences in genome content which are reflected in different physiological and metabolic capacities of M. genitalium and H. influenzae.

[0217] The strategy and methodology for whole genome shotgun sequencing and assembly was similar to that previously described for H. influenzae (R. Fleischmann et al., Science 269:496 (1995). In particular, a total of 50 μg of purified M. genitalium strain G-37 DNA (ATCC No. 33530) was isolated from cells grown in Hayflick's medium. A mixture (990 μl) containing 50 μg of DNA, 300 mM sodium acetate, 10 mM tris HCl, 1 mM EDTA, and 30 percent glycerol was chilled to 0° C. in a nebulizer chamber and sheared at 4 lbs/in² for 60 seconds. The DNA was precipitated in ethanol and redissolved in 50 μl of tris-EDTA (TE) buffer to create blunt ends; a 40 μl portion was digested for 10 minutes at 30° C. in 85 μl of BAL31 buffer with 2 units of BAL 31 nuclease (New England BioLabs). The DNA was extracted with phenol, precipitated in ethanol, dissolved in 60 μl of TE buffer, and fractionated on a 1.0 percent low melting agarose gel. A fraction (2.0 kb) was excised, extracted with phenol, and redissolved in 20 μl of TE buffer. A two-step ligation procedure was used to produce a plasmid library in which 99% of the recombinants contained inserts, of which >99% were single inserts. The first ligation mixture (50 μl) contained approximately 2 μg DNA fragments, 2 μg of SmaI+bacterial alkaline phosphatase pUC 18 DNA (Pharmacia), and 10 units of T4 DNA ligase (GIBCO/BRL), and incubation was for 5 hours at 4° C. After extraction with phenol and ethanol precipitation, the DNA was dissolved in 20 μl of TE buffer and separated by electrophoresis on a 1.0 percent low melting agarose gel. A ladder of ethidium bromide-stained, linearized DNA bands, identified by size as insert (i), vector (v), v+i, v+2i, v+3i, etc. was visualized by 360 nm ultraviolet light. The v+i DNA was excised and recovered in 20 μl of TE buffer. The v+i DNA was blunt-ended by T4 polymerase treatment for 5 minutes at 37° C. in a reaction mixture (50til) containing the linearized v+i fragments, four deoxynucleotide triphosphates (dNTPs) (25 μM each), and 3 units of T4 polymerase (New England Biolabs) under buffer conditions recommended by the supplier. After phenol extraction and ethanol precipitation, the repaired v+i linear pieces were dissolved in 20 μl of TE. The final ligation to produce circles was carried out in a 50 μl reaction containing 5 μl of v+i DNA and 5 units of T4 ligase at 15° C. overnight. The reaction mixture was heated at 67° C. for 10 minutes and stored at −20° C.

[0218] For transformation, a 100 μl portion of Epicurian-SURE 2 Supercompetent Cells (Stratagene 200152) was thawed on ice and transferred to a chilled Falcon 2059 tube on ice. A 1.7 μl volume of 1.42M β-mercaptoethanol was added to the cells to a final concentration of 25 mM. Cells were incubated on ice for 10 minutes. A 1 μl sample of the final ligation mix was added to the cells and incubated on ice for 30 minutes. The cells were heat-treated for 30 seconds at 42° C. and placed back on ice for 2 minutes. The outgrowth period in liquid culture was omitted to minimize the preferential growth of any transformed cell. Instead, the transformed cells were plated directly on a nutrient rich SOB plate containing a 5 ml bottom layer of SOB agar (1.5 percent SOB agar consisted of 20 g of tryptone, 5 g of yeast extract, 0.5 g of NaCl, and 1.5 percent Difco agar/liter). The 5 ml bottom layer was supplemented with 0.4 ml of ampicillin (50 mg/ml) per 100 ml of SOB agar. The 15 ml top layer of SOB agar was supplemented with 1 ml of MgCl₂ (1M) and 1 ml of MgSO₄ (1M) per 100 ml of SOB agar. The 15 ml top layer was poured just before plating. The titer of the library was approximately 100 colonies per 10 μl aliquot of transformation.

[0219] One of the lessons learned from sequencing and assembly of the complete H. influenzae genome was that contig ordering and gap closure is most efficient if the random sequencing phase of the project is continued until at least 99.8% -99.9% of the genome is sequenced with at least 6-fold coverage. To calculate the number of random sequencing reactions necessary to obtain this coverage for the M. genitalium genome, we made use of the Lander and Waterman [E. S. Lander and M. S. Waterman, Genomics 2:231 (1988)] application of the Poisson distribution, where pₓ=e^{-nw/L}. pₓ is the probability that any given base is not sequenced, n is the number of clone insert ends sequenced, w is the average read length of each template in bp, and L is the size of the genome in bp. For a genome of 580 kb with an average sequencing read length of 450 bp after editing, approximately 8650 sequencing reactions (or 4325 clones sequenced from both ends) should theoretically provide 99.85% coverage of the genome. This level of coverage should leave approximately 10 gaps with an average size of 70 bp unsequenced.

[0220] To evaluate the quality of the M. genitalium library, sequence data were obtained from both ends of approximately 600 templates using both the M13 forward (M13-21) and the M13 reverse (M13RP1) primers. Sequence fragments were assembled using the TIGR ASSEMBLER and found to approximate a Poisson distribution of fragments with an average read length of 450 bp for a 580 kb library, indicating that the library was essentially random.

[0221] For this project, a total of 5760 double-stranded DNA plasmid templates were prepared in a 96-well format using a boiling bead method. Ninety-four percent of the templates prepared yielded a DNA concentration ≧30 ng/μl and were used for sequencing reactions. To facilitate ordering of contigs each template was sequenced from both ends. Reactions were carried out on using the AB Catalyst LabStation with Applied Biosystems PRISM Ready reaction Dye Primer Cycle Sequencing Kits for the M13 forward (M13-21) and the M13 reverse (M13RP1) primers. The success rate and average read length after editing with the M13-21 primer were 88 percent and 444 bp, respectively, and 84 percent and 435 bp, respectively, with the M13RP1 primer. All data from template preparation to final analysis of the project were stored in a relational data management system developed at TIGR [A. R. Kerlavage et al., Proceedings of the Twenty-Sixth Annual Hawaii International Conference on System Science (IEEE Computer Society Press, Washington, D.C., 1993), p. 585] To facilitate ordering of contigs each template was sequenced from both ends. A total of 9846 sequencing reactions were performed by five individuals using an average of 8 AB 373 DNA Sequencers per day for a total of 8 weeks. Assembly of 8472 high quality M. genitalium sequence fragments along with 299 random genomic sequences from Peterson et al. (S. N. Peterson et al., J. Bacteriol. 175:7918 (1993)) was performed with the TIGR ASSEMBLER. The assembly process generated 39 contigs (size range: 606 to 73,351 bp) which contained a total of 3,806,280 bp of primary DNA sequence data. Contigs were ordered by ASM_ALIGN, program which links contigs based on information derived from forward and reverse sequencing reactions from the same clone.

[0222] ASM_ALIGN analysis revealed that all 39 gaps were spanned by an existing template from the small insert genomic DNA library (i.e., there were no physical gaps in the sequence assembly). The order of the contigs was confirmed by comparing the order of the random genomic sequences from Peterson et al. (S. N. Peterson et al., J. Bacteriol. 175:7918 (1993)) that were incorporate into the assembly with their known position on the physical map of the M. genitalium chromosome (T. S. Lucier et al., Gene 150:27 (1994); Peterson et al., J. Bacteriol. 177:3199 (1995)). Because of the high stringency of the TIGR ASSEMBLER, the 39 contigs were searched against each other with GRASTA (a modified FASTA (B. Brutlag et al., Comp. Chem. 1:203 (1993)). The BLOSUM 60 amino acid substitution matrix was used in all protein-protein comparisons [S. Henikoff and J. G. Henikoff, Proc. Natl. Acad. Sci. USA 89:1091 (1992)] to detect overlaps (<30 bp) that would have been missed during the initial assembly process. Eleven overlaps were detected with this approach which reduced the total number of gaps from 39 to 28.

[0223] Templates spanning each of the sequence gaps were identified and oligonucleotide primers were designed from the sequences at the end of each contig. All gaps were less than 300 bp; thus a primer walk from both ends of each template was sufficient for closure. All electropherograms were visually inspected with TIGR EDITOR (R. Fleischmann et al., Science 269:496 (1995)) for initial sequence editing. Where a discrepancy could not be resolved o a clear assignment made, the automatic base calls were left unchanged.

[0224] Several criteria for determination of sequence completion were established for the H. influenzae genome sequencing project and these same criteria were applied to this study. Across the assembled M. genitalium genome there is an average sequence redundancy of 6.5-fold. The completed sequence contains less than 1-% single sequence coverage. For each of the 53 ambiguities remaining after editing and the 25 potential frameshifts found after sequence-similarity searching, the appropriate template was resequenced with an alternative sequencing chemistry (dye terminator vs. dye primer) to resolve ambiguities. Although it is extremely difficult to assess sequence accuracy, we estimate our error rate to be less than 1 base in 10,000 based upon frequency of shifts in open reading frames, unresolved ambiguities, overall quality of raw data, and fold coverage.

[0225] A direct cost estimate for sequencing, assembly, and annotation of the M. genitalium genome was determined by summing reagent and labor costs for library construction, template preparation and sequencing, gap closure, sequence confirmation, annotation, and preparation for publication, and dividing by the size of the genome in base pairs. This yielded a final cost of 30 cents per finished base pair.

[0226] Genomic Analysis

[0227] The M. genitalium genome is a circular chromosome of 580,071 bp. The overall G+C content is 32% (A, 34%; C, 16%; G, 16%; and T, 34%). The G+C content across the genome varies between 27 and 37% (using a window of 5000 bp), with the regions of lowest G+C content flanking the presumed origin of replication of the organism. As in H. influenzae (Fleischmann, R. et al., Science 269:496 (1995)), the rRNA operon in M. genitalium contains a higher G+C content (44%) than the rest of the genome, as do the tRNA genes (52%). The higher G+C content in these regions may reflect the necessity of retaining essential G+C base pairing for secondary structure in rRNAs and tRNAs (Rogers, M. J. et al., Isr. J. Med. Sci. 20:768 (1984)).

[0228] The genome of M. genitalium contains 74 EcoRI fragments, as predicted by cosmid mapping data (Lucier, T. S. et al., Gene 150:27 (1994); Peterson et al., J. Bacteriol. 177:3199 (1995)). The order and sizes of the EcoRI fragments determined from sequence analysis are in agreement with those previously reported (Lucier, T. S. et al., Gene 150:27 (1994); Peterson et al., J. Bacteriol. 177:3199 (1995)), with one apparent discrepancy between coordinates 62,708 and 94,573 in the sequence. However, re-evaluation of cosmid hybridization data in light of results from genome sequence analysis confirms that the sequence data are correct, and the extra 4.0 kb EcoRI fragment in this region of the cosmid map reflects a misinterpretation of the overlap between cosmids J-8 and 21 (Lucier, T. S., unpublished observation). The ends of each clone from the ordered cosmid library were sequenced and are shown on the circular chromosome in FIG. 4. The order of the cosmids based on sequence analysis is in complete agreement with that determined by physical mapping (Lucier, T. S. et al., Gene 150:27 (1994); Peterson et al., J. Bacteriol. 177:3199 (1995)).

[0229] We defined the first bp of the chromosomal sequence of M. genitalium based on the putative origin of replication (Bailey & Bott, J. Bacteriol. 176:5814 (1994)). Studies of origins of replication in some prokaryotes have shown that DNA synthesis is initiated in an untranscribed AT rich region between dnaA and dnaN (Ogasawara, N. et al., in The Bacterial Chromosome, Krlica & Riley, eds., American Society for Microbiology, Washington, D.C. (1990), pp. 287-295; Ogasawara & Yoshikawa, Mol. Microbiol. 6:629 (1992)). A search of the M. genitalium sequence for “DnaA boxes” around the putative origin of replication with consensus “DnaA boxes” from Escherichia coli, Bacillus subtilis, and Pseudomonas aeruginosa revealed no significant matches. Although we have not been able to precisely localize the origin, the co-localization of dnaA and dnaN to a 4000 bp region of the chromosome lends support to the hypothesis that it is the functional origin of replication in M. genitalium (Ogasawara, N. et al., in The Bacterial Chromosome, Krlica & Riley, eds., American Society for Microbiology, Washington, D.C. (1990), pp. 287-295; Ogasawara & Yoshikawa, Mol. Microbiol. 6:629 (1992), Miyata, M. et al., Nucleic Acids Res. 21:4816 (1993)). We have chosen an untranscribed region between dnaA and dnaN so that dnaN is numbered as the first open reading frame in the genome. As seen in FIG. 4, genes to the right of this region are preferentially transcribed from the plus strand and to the left of this region, are preferentially transcribed from the minus strand. The apparent polarity in gene transcription is maintained across each half of the genome (FIGS. 4 and 5). This stands in marked contrast to H. influenzae which displays no apparent polarity of transcription around the origin of replication. The significance of this observation remains to be determined.

[0230] The predicted coding regions of M. genitalium were initially defined by searching the entire genome for open reading frames greater than 100 amino acids. Translations were made using the genetic code for mycoplasma species in which UGA encodes tryptophan. All open reading frames were searched with BLAZE (Brutlag, D. et al., Comp. Chem. 1:203 (1993). The BLOSUM 60 amino acid substitution matrix was used in all protein-protein comparisons (Henikoff, S. and Henikoff, J. G., Proc. Natl. Acad. Sci. USA 89:1091 (1992)) against a non-redundant bacterial protein database (NRBP) (Fleischmann, R. et al., Science 269:496 (1995)) developed at TIGR on a MasPar MP-2 massively parallel computer with 4096 microprocessors. Protein matches were aligned with PRAZE, a modified Smith-Waterman (Waterman, M. S., Methods Enzymol. 164:765 (1988)) algorithm. Segments between predicted coding regions of the genome were used in additional searches against all protein sequences from GenPept, Swiss-Prot, and PIR. Pairwise alignments between M. genitalium predicted open reading frames and sequences from the public archives were examined. Motif matches were annotated in cases where sequence similarity was confined to short domains in the predicted coding region. The coding potential of 170 unidentified open reading frames was analyzed with GeneMark (Borodovsky & Mcninch, ibid, p. 123) which had been trained with 308 M. genitalium sequences. Open reading frames that had low coding potential (based on the GeneMark analysis) and were smaller than. 100 nucleotides (a total of 53) were removed from the final set of putative coding regions. In a separate analysis, open reading frames were searched against the complete set of translated sequences from H. influenzae (GSDB accession L42023, see (Fleischmann, R. et al., Science 269:496 (1995))). In total, these processes resulted in the identification of 482 predicted coding regions, of which 365 were putatively identified (Twenty-three of the protein matches in Table 6 were annotated as motifs. These data matches were not full-length protein matches, but nonetheless displayed regions of significant amino acid similarity) and 117 had no matches to protein sequences from any other organism.

[0231] The 365 predicted coding regions that matched protein sequences from the public sequence archives were assigned biological roles. The role classifications were developed from Riley (Riley, M., Microbiol. Rev. 57:862 (1992)) and identical to those used in H. influenzae assignments (Fleischmann, R., et al., Science 269:496 (1995)). A separate search procedure was used in cases where we were unable to detect genes in the M. genitalium genome. Query peptide sequences that were available from eubacteria such as E. coli, B. subtilis, M. capricolum, and H. influenzae were used in searches against all six reading frame translations of the entire genome sequence, and the alignments were examined. The possibility remains that current searching methods, an incomplete set of query sequences, or the subjective analysis of the database matches, are not sensitive enough to identify certain M. genitalium gene sequences.

[0232] One-half of all predicted coding regions in M. genitalium for which a putative identification could be assigned display the greatest degree of similarity to a protein from either a gram-positive organism (e.g., B. subtilis) or a Mycoplasma species. The significance of this finding is underscored by the fact that NRBP contained 3885 sequences from E. coli and only 1975 sequences from B. subtilis. In the majority of cases where M. genitalium coding regions matched sequences from both E. coli and Bacillus species, the better match was to a sequence from Bacillus (average of 62 percent similarity) rather than to a sequence from E. coli (average of 56 percent similarity). The evolutionary relationship between Mycoplasma and the Lactobacillus-Clostridium branch of the gram-positive phylum has been deduced from small subunit rRNA sequences (Maidak, B. L. et al., Nucleic Acids Research 22:3485 (1994)). Our data from whole genome analysis support this hypothesis.

[0233] Comparative Genomics: M. genitalium and H. influenzae

[0234] A survey of the genes and their organization in M. genitalium makes possible the description of a minimal set of genes required for survival. One would predict that a minimal cell must contain genes for replication and transcription, at least one rRNA operon and a set of ribosomal proteins, tRNAs and tRNA synthetases, transport proteins to derive nutrients from the environment, biochemical pathways to generate ATP and reducing power, and mechanisms for maintaining cellular homeostasis. Comparison of the genes identified in M. genitalium with those in H. influenzae allows for identification of a basic complement of genes conserved in these two species and provides insights into physiological differences between one of the simplest self-replicating prokaryotes and a more complex, gram-negative bacterium.

[0235] The M. genitalium genome contains 482 predicted coding sequences (Table 6) as compared to 1,727 identified in H. influenzae (Fleischmann, R. et al., Science 269:496 (1995)). Table 7 summarizes the gene content of both organisms sorted by functional category. The percent of the total genome in M. genitalium and H. influenzae encoding genes involved in cell envelope, cellular processes, energy metabolism, purine and pyrimidine metabolism, replication, transcription, transport, and other categories is similar; although the total number of genes in these categories is considerably fewer in M. genitalium. A smaller percentage of the M. genitalium genome encodes genes involved in amino acid biosynthesis, biosynthesis of co-factors, central intermediary metabolism, fatty acid and phospholipid metabolism, and regulatory functions as compared with H. influenzae. A greater percentage of the M. genitalium genome encodes proteins involved in translation than in H. influenzae , as shown by the similar numbers of ribosomal proteins and tRNA synthetases in both organisms.

[0236] The 482 predicted coding regions in M. genitalium (average size of 1100 bp) cover 85% of the genome (on average, one gene every 1169 bp), a value similar to that found in H. influenzae where 1727 predicted coding regions (average size of 900 bp) cover 91% of the genome (one gene every 1042 bp). These data indicate that the reduction in genome size that has occurred within Mycoplasma has not led to an increase in gene density or a decrease in gene size (Bork, P. et al., Mol. Microbiol. 16:955 (1995)). A global search of M. genitalium and H. influenzae genomes reveals short regions of conservation of gene order, particularly two clusters of ribosomal proteins.

[0237] Replication. Two major protein complexes are formed during replication: the primosome and the replisome. We have identified genes encoding many of the essential proteins in the replication process, including M. genitalium isologs of the primosome proteins DnaA, DnaB, GyrA, GyrB, a single stranded DNA binding protein, and the primase protein, DnaE. DnaJ and DnaK, heat shock proteins that may function in the release of the primosome complex, are also found in M. genitalium. A gene encoding the DnaC protein, responsible for delivery of DnaB to the primosome, has yet to be identified.

[0238] Genes encoding most of the essential subunit proteins for DNA polymerase III in M. genitalium were also identified. The polC gene encodes the a subunit which contains the polymerase activity. We have also identified the isolog of dnaH in B. subtilis (dnaX in E. coli) which encodes the γ and t subunits as alternative products from the same gene. These proteins are necessary for the processivity of DNA polymerase III. An isolog of dnaN which encodes the P subunit was previously identified in M. genitalium (Bailey & Bott, J. Bacteriol. 176:5814 (1994)) and is involved in the process of clamping the polymerase to the DNA template. While we have yet to identify a gene encoding the subunit responsible for the 3′-5′ proofreading activity, it is possible that this activity is encoded in the a subunit as has been previously described (Sanjanwala, B. and Ganesa, A. T., Mol. Gen. Genet. 226:467 (1991); Sanjanwala, B. and Ganesan, A. T., Proc. Natl. Acad. Sci. USA 86:4421 (1989)). Finally, we have identified a gene encoding a DNA ligase, necessary for the joining of the Okazaki fragments formed during synthesis of the lagging strand.

[0239] While we have identified genes encoding many of the isologs thought to be essential for DNA replication, some genes encoding proteins with key functions have yet to be identified. Examples of these are the DnaC protein mentioned above as well as Dnaθ and Dnaδ whose functions are less well understood but are thought to be involved in the assembly and processivity of polymerase III. Also apparently absent is a specific RNaseH protein responsible for the hydrolysis of the RNA primer synthesized during lagging strand synthesis.

[0240] DNA Repair. It has been suggested that in E. coli as many as 100 genes are involved in DNA repair (Kornberg, A. and Baker, T. A., DNA Replication—2nd Ed., W. H. Freeman and Co., New York (1992)), and in H. influenzae the number of putatively identified DNA repair enzymes is approximately 30 (Fleischmann, R. et al., Science 269:496 (1995)). Although M. genitalium appears to have the necessary genes to repair many of the more common lesions in DNA, the number of genes devoted to the task is much smaller. Excision repair of regions containing missing bases (apurinic/apyriminic (AP) sites) can likely occur by a pathway involving endonuclease IV (info), Pol I, and ligase. The ung gene which encodes uracil-DNA glycosylase is present. This activity removes uracil residues from DNA which usually arise by spontaneous deamination of cytosine. This produces an AP site which could then be repaired as described above.

[0241] All three genes necessary for production of the uvr ABC exinuclease are present, and along with Pol I, helicase II, and ligase should provide a mechanism for repair of damage such as cross-linking, which requires replacement of both strands. Although recA is present, which in E. coli is activated as it binds to single strand DNA, thereby initiating the SOS response, we find no evidence for a lexA gene which encodes the repressor which regulates the SOS genes. We have not identified photolyase (phr) in M. genitalium which repairs UV-induced pyrimidine dimers, or other genes involved in reversal of DNA damage rather than excision and replacement of the lesion.

[0242] Transcription. The critical components for transcription were identified in M. genitalium. In addition to the a, b, and b-prime subunits of the core RNA polymerase, M. genitalium appears to encode a single & factor, whereas E. coli and B. subtilis encode at least six and seven, respectively. We have not detected a homolog of the Rho termination factor gene, so it seems likely that a mechanism similar to Rho-independent termination in E. coli operates in M. genitalium. We have clear evidence for homologs of only two other genes which modulate transcription, nusA and nusG.

[0243] Translation. M. genitalium possesses a single rRNA operon which contains three rRNA subunits in the order: 16S rRNA(1518 bp)-spacer (203 bp)-23S rRNA (2905 bp)-spacer (56 bp)-5S rRNA (103 bp). The small subunit rRNA sequence was compared with the Ribosomal Database Project's (Maidak, B. L. et al., Nucleic Acids Research 22:3485 (1994)) prokaryote database with the program “similarity_yank.” Our sequence is identical to the M. genitalium (strain G37) sequence deposited there, and the 10 most similar taxa returned by this search are also in the genus Mycoplasma.

[0244] A total of 33 tRNA genes were identified in M. genitalium, these were organized into five clusters plus nine single genes. In all cases, the best match for each tRNA gene in M. genitalium was the corresponding gene in M. pneumoniae (Simoneau, P. et al., Nuc. Acids Res. 21:4967 (1993)). Furthermore, the grouping of tRNAs into clusters (tmA, trnB, trnC, trnD, and trnE) was identical in M. genitalium and M. pneumoniae as was gene order within the cluster (Simoneau, P. et al., Nuc. Acids Res. 21:4967 (1993)). The only difference between M. genitalium and M. pneumoniae observed with regard to tRNA gene organization was an inversion between trnD and GTG. In contrast to H. influenzae and many other eubacteria, no tRNAs were found in the spacer region between the 16S and 23S rRNA genes in the rRNA operon of M. genitalium, similar to what has been reported for M. capricolum (Sawada, M. et al., Mol. Gen. Genet. 182:502 (1981)).

[0245] A search of the M. genitalium genome for tRNA synthetase genes identified all of the expected genes with the exception of glutaminyl tRNA synthetase. We expect that this gene is present in the M. genitalium genome, but we have not been able to identify it by similarity searches. The latest GenBank release (release 89) contains only a single entry for a glutaminyl tRNA synthetase from a bacterial species; this was from E. coli, a gram-negative organism only distantly related to Mycoplasma. In general, tRNA synthetase sequences from gram-positive organisms such as B. subtilis displayed greater similarity to those from M. genitalium than the corresponding sequences from E. coli, lending support to the notion that the similarity between the E. coli and M. genitalium glutaminyl tRNA synthetase may not have been high enough to be detected.

[0246] Metabolic pathways. The reduction in genome size among Mycoplasma species is associated with a marked reduction in the number and components of biosynthetic pathways in these organisms, requiring them to use metabolic products from their hosts. In the laboratory, M. genitalium has not been grown in a chemically defined medium. The complex growth requirements of this organism can be explained by the almost complete lack of enzymes involved in amino acid biosynthesis, de novo nucleotide biosynthesis, and fatty acid biosynthesis (Table 6 and FIGS. 5A-5R). When the number of genes in the categories of central intermediary metabolism, energy metabolism, and fatty acid and phospholipid metabolism are summed, marked differences in gene content between H. influenzae and M. genitalium are apparent. For example, whereas the H. influenzae genome contains 68 genes involved in amino acid biosynthesis, the M. genitalium genome contains only one. In total, the H. influenzae genome has 167 genes associated with metabolic pathways whereas the M. genitalium genome has just 42. A recent analysis of 214 kb of sequence from Mycoplasma capricolum (Bork, P. et al., Mol. Microbiol. 16:955 (1995)), a related organism whose genome size is twice as large as that of M. genitalium, reveals that M. capricolum contains a number of biosynthetic enzymes not present in M. genitalium. This observation suggests that M. capricolum's larger genome confers a greater anabolic capacity.

[0247] M. genitalium is a facultative anaerobe that ferments glucose and possibly other sugars via glycolysis to lactate and acetate. Genes that encode all the enzymes of the glycolytic pathway were identified, including genes for components of the pyruvate dehydrogenase complex, phosphotransacetylase, and acetate kinase. The major route for ATP synthesis may be through substrate level phosphorylation since no cytochromes are present. M. genitalium also lacks all the components of the tricarboxylic acid cycle. None of the genes coding for glycogen or poly-beta-hydroxybutryate production were identified, indicating limited capacity for carbon and energy storage. The pentose phosphate pathway also appears limited since only genes encoding 6-phosphogluconate dehydrogenase and transketolase were identified. The limited metabolic capacity of M. genitalium sharply contrasts with the complexity of catabolic pathways in H. influenzae, reflecting the four-fold greater number of genes involved in energy metabolism found in H. influenzae.

[0248] Transport. The transporters identified in H. influenzae are specific for a range of nutritional substrates. Using protein transport as an example, both oligopeptide and amino acid transporters are represented. One interesting peptide transporter has homology to a lactococcin transporter (IcnDR3) and related bacteriocin transporters, suggesting the M. genitalium may export a small peptide with antibacterial activity. The H. influenzae isolog of the M. hyorhinis p37 high-affinity transport system also has a conserved lipid modification site, providing further evidence that the Mycoplasma binding-protein dependent transport systems are organized in a manner analogous to gram positive bacteria (Gilson, E. et al., EMBO J. 7:3971 (1988)).

[0249] Genes encoding proteins that function in the transport of glucose via the phosphoenolpyruvate:sugar transferase system (PTS) have been identified in M. genitalium. These include enzyme I (EI), HPr and sugar specific enzyme IIs (EII) (Postma, P. W. et al., Microbiol. Rev. 57:543 (1993)). EIIs consist of a complex of at least there domains, EIIA, EIIB and EIIC. In some bacteria (e.g., E. coli), EIIA is a soluble protein, while in others (Bacillus subtilis), a single membrane protein contains all three domains, EIIA, B and C. These variations in the proteins that make up the Ell complex are due to fusion or splitting of domains during evolution and are not considered to be mechanistic differences (Postma, P. W. et al., Microbiol. Rev. 57:543 (1993)). In M. genitalium EIIA, B, and C are located in a single protein similar to the protein found in B. subtilis. In Mycoplasma capricolum ptsH, the gene which encodes for HPr, is located on a monocistronic transcriptional unit while genes encoding EI (ptsI) and EIIA (crr) are located on a dicistronic operon (Zhu, P. P. et al., Protein Sci. 3:2115 (1994); Zhu, P. P. et al., J. Biol. Chem. 268:26531 (1993)). In most bacterial species studied to date, ptsl, ptsH, and crr are part of a polycistronic operon (pts operon). In M. genitalium ptsH, ptsI and the gene encoding EIIABC reside at different locations of the genome and thus each of these genes may constitute monocistronic transcriptional units. We have also identified EIIBC component for uptake of fructose; however, other components of the fructose PTS were not found. Thus, M. genitalium may be limited to the use of glucose as an energy source. In contrast, H. influenzae has the ability to use at least six different sugars as a source of carbon and energy.

[0250] Regulatory Systems. It appears that regulatory systems found in other bacteria are absent in M. genitalium. For instance, although two component systems have been described for a number of gram-positive organisms, no sensor or response regulator genes are found in the M. genitalium genome. Furthermore, the lack of a heat shock σ factor raises the question of how the heat shock response is regulated. Another stress faced by all metabolically active organisms is the generation of reactive oxygen intermediates such as superoxide anions and hydrogen peroxide. Although H. influenzae has an oxyR homologue, as well as catalase and superoxide dismutase, M. genitalium appears to lack these genes as well as an NADH peroxidase. The importance of these reactive intermediate molecules in host cell damage suggests that some as yet unidentified protective mechanism may exist within the cell.

[0251] Antigenic variation. Numerous examples exist of microbial pathogens expressing outer membrane proteins that vary due to DNA rearrangements as a mechanism for providing antigenic and functional variations that influence virulence potential (Bergstrom, S. et al., Proc. Natl. Acad. Sci. USA 83:3890 (1986); Meier, J. T. et al., Cell 47:61 (1986); Majiwa, P. A. O. et al., Nature 297:514 (1982)). Because humans are the natural host for both M. genitalium and H. influenzae, it was of interest to compare mechanisms for generating antigenic variation in these organisms. In H. influenzae, a number of virulence-related genes encoding membrane proteins contain tandem tetramer repeats that undergo frequent addition and deletion of one or more repeat units during replication, such that the reading frame of the gene is changed and its expression altered (Weiser, J. N. et al., Cell 59:657 (1989)).

[0252] M. genitalium appears to use a different system for evading host immune responses. The 140 kDa adhesion protein of M. genitalium is densely clustered at a differentiated tip of this organism and elicits a strong immune response in humans and experimentally infected animals (Collier, A. M. et al., Zbl. Bkt. Suppl. 20:73 (1992)). The adhesion protein (MgPa) operon in M. genitalium contains a 29 kDa ORF, the MgPa protein (160 kDa) and a 114 kDa ORF with intervening regions of 6 and 1 nt, respectively (Inamine, J. M. et al., Gene 82:259 (1989)). Based on hybridization experiments (Dallo, S. F. and Baseman, J. B., Microb. Pathog. 8:371 (1990)), multiple copies of regions of the M. genitalium MgPa gene and the 114 kDa ORF are known to exist throughout the genome.

[0253] The availability of the complete genomic sequence from M. genitalium has allowed a comprehensive mapping of the MgPa repeats (FIGS. 4 and 6). In addition to the complete operon, nine repetitive elements which are composites of particular regions of the MgPa operon were found. The percent of sequence identity between the repeat elements and the MgPa gene ranges from 78%-90%. In some of the repeats, the MgPa-related sequences are separated in the genome by a variable length, A-T rich spacer sequence, as has previously been described (Peterson, S. N., PhD dissertation, Univ. No. Carolina 1992, Univ. Mi. Dissertation Services #6246). The sequences contained in the MgPa operon and the nine repeats scattered throughout the chromosome represent 4.5% of the total genomic sequence. At first glance this might appear to contradict the expectation for a minimal genome. However, recent evidence for recombination between the repetitive elements and the MgPa operon has been reported (Peterson, S. N. et al., Proc. Natl. Acad. Sci. USA, in press (1995)). Such recombination may allow M. genitalium to evade the host immune response through mechanisms that induce antigenic variation within the population. Since M. genitalium survives in nature by obtaining essential nutrients from its mammalian host, an efficient mechanism to evade the immune response may be a necessary part of this minimal genome.

[0254] The M. genitalium genome contains 93 putatively identified genes that are apparently not present in H. influenzae. Almost 60% of these genes have database matches to known or hypothetical proteins from gram-positive bacteria or other Mycoplasma species, suggesting that these genes may encode proteins with a restricted phylogenetic distribution. One hundred seventeen potential coding regions in M. genitalium have no database match to any sequences in public archives including the entire H. influenzae genome; therefore, these likely represent novel. genes in M. genitalium, and related organisms.

[0255] The predicted coding sequences of the hypothetical ORFs, the ORFs with motif matches and the ORFs that have no similarities to known peptide sequences were analyzed. The two programs used were the Kyte-Doolittle algorithm (Kyte, J. and Doolittle, R. F., J. Mol. Biol. 157:105 (1982)) with a range of 11 residues, and PSORT which is available on the WWW site http://psort.nibb.ac.jp. PSORT predicts the presence of signal sequences by the methods of McGeoch (McGeoch, D. J., Virus Res. 3:271 (1985)) and von Heijne (von Heijne, G., Nucl. Acids Res. 14:4683 (1986)), and detects potential transmembrane domains by the method of Klein et al. (Klein, P. et al., Biochim. Biophys. Acta 815:468 (1985)). Of a total of 201 ORFs examined, 90 potential membrane proteins were found. Eleven of them are predicted to have type I signal peptides, and five type II signal peptides. Using this approach, at least fifty potential membrane proteins were identified from the list of ORFs with known functions. This brings the total number of membrane proteins in M. genitalium to approximately 140.

[0256] To manage these putative membrane proteins, M. genitalium has at its disposal a minimal secretary machinery composed of seven functions: three chaperoning GroEL, DnaK and the trigger factor Tig (Pugsley, A. P., Microbiol. Rev. 57:50 (1993); Guthrie, B. and Wickner, W., J. Bacteriol. 172:5555 (1990), an ATPase pilot protein SecA, one integral membrane protein translocase (SecY), a signal recognition particle protein (Ffh) and a lipoprotein-specific signal peptidase LspA (Pugsley, A. P., Microbiol. Rev. 57:50 (1993)). Perhaps the lack of other known translocases like SecE, SecD, and SecF which are present in E. coli and H. influenzae , is related to the fact that M. genitalium has a one-layer cell envelope. Also, the absence of a SecB homologue, the secretory chaperonin of E. coli, in M. genitalium (it is also absent in B. subtilis (Collier, D. N. J. Bacteriol. 176:4937 (1994))) might reflect a difference between gram negative and wall-less Mollicutes in handling nascent proteins destined for the general secretory pathway. Considering the presence of several putative membrane proteins that contain type I signal peptides, the absence of a signal peptidase I (lepB) is most surprising. A direct electronic search for the M. genitalium lepB gene using the E. coli lepB and the B. subtilis sipS (van Dijil, J. M. et al., EMBO J. 11:2819 (1992)) as queries did not reveal any significant similarities.

[0257] There are a number of possible explanations as to why genes encoding some of the proteins thought to be essential for a self-replicating organism appear to be absent in M. genitalium. One possibility is that a limited number of proteins may have adapted to take on other functions. A second possibility is that certain proteins thought to be essential for life based on studies in E. coli are not required in a simpler prokaryote like M. genitalium. Finally, it may be that sequences from M. genitalium have such a low similarity to known sequences from other species that matches are not detectable above a reasonable confidence threshold.

[0258] Determination of the complete genome sequence of M. genitalium provides a new starting point in understanding the biology of this and related organisms. Comparison of the genes expressed in M. genitalium, a simple prokaryote, with those in H. influenzae, a more complex organism, has revealed a myriad of differences between these species. Fifty-six percent of the genes in M. genitalium have apparent isologs in H. influenzae, suggesting that this subset of the M. genitalium genome may encode the genes that are truly essential for a self-replicating organism. Notable among the genes that are conserved between M. genitalium and H. influenzae are those involved in DNA replication and repair, transcription and translation, cell division, and basic energy metabolism via glycolysis. Isologs of these genes are found in eukaryotes as well.

### EEXAMPLE 2

[0259] Production of an Antibody to a Mycoplasma genitalium Protein

[0260] Substantially pure protein or polypeptide is isolated from the transfected or transformed cells using any one of the methods known in the art. The protein can also be produced in a recombinant prokaryotic expression system, such as E. coli, or can by chemically synthesized. Concentration of protein in the final preparation is adjusted, for example, by concentration on an Amicon filter device, to the level of a few micrograms/ml. Monoclonal or polyclonal antibody to the protein can then be prepared as follows:

[0261] Monoclonal Antibody Production by Hybridoma Fusion

[0262] Monoclonal antibody to epitopes of any of the peptides identified and isolated as described can be prepared from murine hybridomas according to the classical method of Kohler, G. and Milstein, C., Nature 256:495 (1975) or modifications of the methods thereof. Briefly, a mouse is repetitively inoculated with a few micrograms of the selected protein over a period of a few weeks. The mouse is then sacrificed, and the antibody producing cells of the spleen isolated. The spleen cells are fused by means of polyethylene glycol with mouse myeloma cells, and the excess unfused cells destroyed by growth of the system on selective media comprising aminopterin (HAT media). The successfully fused cells are diluted and aliquots of the dilution placed in wells of a microtiter plate where growth of the culture is continued. Antibody-producing clones are identified by detection of antibody in the supernatant fluid of the wells by immunoassay procedures, such as ELISA, as originally described by Engvall, E., Meth. Enzymol. 70:419 (1980), and modified methods thereof. Selected positive clones can be expanded and their monoclonal antibody product harvested for use. Detailed procedures for monoclonal antibody production are described in Davis, L. et al. Basic Methods in Molecular Biology Elsevier, New York. Section 21-2 (1989).

[0263] Polyclonal Antibody Production by Immunization

[0264] Polyclonal antiserum containing antibodies to heterogeneous epitopes of a single protein can be prepared by immunizing suitable animals with the expressed protein described above, which can be unmodified or modified to enhance immunogenicity. Effective polyclonal antibody production is affected by many factors related both to the antigen and the host species. For example, small molecules tend to be less immunogenic than other and may require the use of carriers and adjuvant. Also, host animals vary in response to site of inoculations and dose, with both inadequate or excessive doses of antigen resulting in low titer antisera. Small doses (ng level) of antigen administered at multiple intradermal sites appears to be most reliable. An effective immunization protocol for rabbits can be found in Vaitukaitis, J. et al., J. Clin. Endocrinol. Metab. 33:988-991 (1971).

[0265] Booster injections can be given at regular intervals, and antiserum harvested when antibody titer thereof, as determined semi-quantitatively, for example, by double immunodifflision in agar against known concentrations of the antigen, begins to fall (See Ouchterlony, O. et al., Chap. 19 in: Handbook ofExperimental Immunology, Wier, D., ed, Blackwell (1973)). Plateau concentration of antibody is usually in the range of 0.1 to 0.2 mg/ml of serum (about 12 μM). Affinity of the antisera for the antigen is determined by preparing competitive binding curves, as described, for example, by Fisher, D., Chap. 42 in: Manual of Clinical Immunology, second edition, Rose and Friedman, (eds.), Amer. Soc. For Microbio., Washington, D.C. (1980).

[0266] Antibody preparations prepared according to either protocol are useful in quantitative immunoassays which determine concentrations of antigen-bearing substances in biological samples; they are also used semi-quantitatively or qualitatively to identify the presence of antigen in a biological sample.

### EXAMPLE 3

[0267] Preparation of PCR Primers and Amplification of DNA

[0268] Various fragments of the Mycoplasma genitalium genome, such as those disclosed in Tables 1a, 1b, 1c and 2 can be used, in accordance with the present invention, to prepare PCR primers for a variety of uses. The PCR primers are preferably at least 15 bases, and more preferably at least 18 bases in length. When selecting a primer sequence, it is preferred that the primer pairs have approximately the same G/C ratio, so that melting temperatures are approximately the same. The PCR primers and amplified DNA of this Example find use in the examples that follow.

### EXAMPLE 4

[0269] Gene Expression from DNA Sequences Corresponding to ORFs

[0270] A fragment of the Mycoplasma genitalium genome provided in Tables 1a, 1b, 1c and 2 is introduced into an expression vector using conventional technology (techniques to transfer cloned sequences into expression vectors that direct protein translation in mammalian, yeast, insect or bacterial expression systems are well known in the art). Commercially available vectors and expression systems are available from a variety of suppliers including Stratagene (La Jolla, Calif.), Promega (Madison, Wis.), and Invitrogen (San Diego, Calif.). If desired, to enhance expression and facilitate proper protein folding, the codon context and codon pairing of the sequence may be optimized for the particular expression organism, as explained by Hatfield et al., U.S. Pat. No. 5,082,767, which is hereby incorporated by reference.

[0271] The following is provided as one exemplary method to generate polypeptide(s) from cloned ORFs of the Mycoplasma genome fragment. Since the ORF lacks a poly A sequence because of the bacterial origin of the ORF, this sequence can be added to the construct by, for example, splicing out the poly A sequence from pSG5 (Stratagene) using BglI and SalI restriction endonuclease enzymes and incorporating it into the mammalian expression vector pXT1 (Stratagene) for use in eukaryotic expression systems. pXT1 contains the LTRs and a portion of the gag gene from Moloney Murine Leukemia Virus. The position of the LTRs in the construct allow efficient stable transfection. The vector includes the Herpes Simplex thymidine kinase promoter and the selectable neomycin gene. The Mycoplasma DNA is obtained by PCR from the bacterial vector using oligonucleotide primers complementary to the Mycoplasma DNA and containing restriction endonuclease sequences for PstI incorporated into the 5′ primer and BgllI at the 5′ end of the corresponding Mycoplasma DNA 3′ primer, taking care to ensure that the Mycoplasma DNA is positioned such that its followed with the poly A sequence. The purified fragment obtained from the resulting PCR reaction is digested with PstI, blunt ended with an exonuclease, digested with BglII, purified and ligated to pXT1, now containing a poly A sequence and digested BglII.

[0272] The ligated product is transfected into mouse NIH 3T3 cells using Lipofectin (Life Technologies, Inc., Grand Island, N.Y.) under conditions outlined in the product specification. Positive transfectants are selected after growing the transfected cells in 600 μg/ml G418 (Sigma, St. Louis, Mo.). The protein is preferably released into the supernatant. However if the protein has membrane binding domains, the protein may additionally be retained within the cell or expression may be restricted to the cell surface.

[0273] Since it may be necessary to purify and locate the transfected product, synthetic 15-mer peptides synthesized from the predicted Mycoplasma DNA sequence are injected into mice to generate antibody to the polypeptide encoded by the Mycoplasma DNA.

[0274] If antibody production is not possible, the Mycoplasma DNA sequence is additionally incorporated into eukaryotic expression vectors and expressed as a chimeric with, for example, β-globin. Antibody to β-globin is used to purify the chimeric. Corresponding protease cleavage sites engineered between the β-globin gene and the Mycoplasma DNA are then used to separate the two polypeptide fragments from one another after translation. One useful expression vector for generating β-globin chimerics is pSG5 (Stratagene). This vector encodes rabbit β-globin. Intron II of the rabbit β-globin gene facilitates splicing of the expressed transcript, and the polyadenylation signal incorporated into the construct increases the level of expression. These techniques as described are well known to those skilled in the art of molecular biology. Standard methods are published in methods texts such as Davis et al. and many of the methods are available from the technical assistance representatives from Stratagene, Life Technologies, Inc., or Promega. Polypeptide may additionally be produced from either construct using in vitro translation systems such as In vitro Express™ Translation Kit (Stratagene).

[0275] While the present invention has been described in some detail for purposes of clarity and understanding, one skilled in the art will appreciate that various changes in formn and detail can be made without departing from the true scope of the invention.

[0276] All patents, patent applications and publications recited herein are hereby incorporated by reference.

TABLE 1(a)

| UID | end5 | end3 | db_match | db_match name | per_id | per_sim | gene_len |
|---|---|---|---|---|---|---|---|
| MG006 | 8552 | 9181 | SP-P00572 | thymidylate kinase (CDC8) {Saccharomyces cerevisiae} | 27.5862 | 51.7241 | 630 |
| MG009 | 11252 | 12037 | GB: D26185_{—} | hypothetical protein (GB: D26185_102) {Bacillus subtilis} | 35.4331 | 55.1181 | 786 |
| | | | 102 | | | | |
| MG010 | 12069 | 12722 | SP: P33655 | DNA primase (dnaE) {Clostridium acetobutylicum} | 25.731 | 53.2164 | 654 |
| MG012 | 14247 | 13573 | SP: P17116 | ribosomal protein S6 modification protein (rimK) {Escherichia coli} | 31.4961 | 54.3307 | 675 |
| MG013 | 15217 | 14399 | GB: D10588_1 | 5,10-methylene-tetrahydrofolate dehydrogenase (folD) {Escherichia | 33.0472 | 53.2189 | 819 |
| | | | | coli} | | | |
| MG015 | 17474 | 19240 | SP: P27299 | transport ATP-binding protein (msbA) {Escherichia coli} | 32.2382 | 57.4949 | 1767 |
| MG023 | 26478 | 27341 | GB: M22039_4 | fructose-bisphosphate aldolase (tsr) {Bacillus subtilis} | 45.9649 | 65.9649 | 864 |
| MG024 | 27345 | 28445 | GP: U02423_1 | GTP-binding protein (gtpl) {Escherichia coli} | 46.8401 | 67.658 | 1101 |
| MG032 | 36978 | 38975 | GB: M63489_1 | ATP-dependent nuclease (addA) {Bacillus subtilis} | 26.8293 | 54.2683 | 1998 |
| MG033 | 39242 | 39901 | GB: M99611_2 | glycerol uptake facilitator (glpF) {Bacillus subtilis} | 35.8974 | 55.3846 | 660 |
| MG034 | 40514 | 39876 | GB: M97678_5 | thymidine kinase (tdk) {Bacillus subtilis} | 48.1283 | 69.5187 | 639 |
| MG035 | 40543 | 41784 | GB: U00011_2 | histidyl-tRNA synthetase (hisS) {Mycobacterium leprae} | 30.7107 | 50.7614 | 1242 |
| MG038 | 46277 | 44754 | GB: L19201_68 | glycerol kinase (glpK) {Escherichia coli} | 46.8254 | 70.2381 | 1524 |
| MG039 | 47422 | 46271 | PIR: S48379 | glycerol-3-phospate dehydrogenase (GUT2) {Saccharomyces | 43.2099 | 60.4938 | 1152 |
| | | | | cerevisiae} | | | |
| MG041 | 49377 | 49640 | GB: L22432_2 | phosphohistidinoprotein-hexose phosphotransferase (ptsH) | 48.8636 | 70.4545 | 264 |
| | | | | {Mycoplasma capricolum} | | | |
| MG042 | 50060 | 51517 | GB: M64519_1 | spermidine/putrescine transport ATP-binding protein (potA) | 41.9231 | 65.3846 | 1458 |
| | | | | {Escherichia coli} | | | |
| MG043 | 51525 | 52379 | GB: M64519_2 | spermidine/putrescine transport system permease protein (potB) | 26.5116 | 57.2093 | 855 |
| | | | | {Escherichia coli} | | | |
| MG044 | 52366 | 53217 | GB: M64519_3 | spermidine/putrescine transport system permease protein (potC) | 29.4574 | 58.1395 | 852 |
| | | | | {Escherichia coli} | | | |
| MG046 | 54658 | 55602 | GB: M62364_1 | sialoglycoprotease (gcp) {Pasteurella haemolytica} | 36.6013 | 59.4771 | 945 |
| MG048 | 58310 | 56973 | SP: P37105 | signal recognition particle protein (ffh) {Bacillus subtilis} | 43.0206 | 66.1327 | 1338 |
| MG049 | 58117 | 59076 | GB: U14003_{—} | purine-nucleoside phosphorylase (deoD) {Escherichia coli} | 44.7826 | 63.0435 | 960 |
| | | | 295 | | | | |
| MG050 | 59083 | 59751 | GB: X13544_1 | deoxyribose-phosphate aldolase (deoC) {Mycoplasma pneumoniae} | 83.0357 | 91.5179 | 669 |
| MG056 | 65731 | 64901 | GB: D26185_99 | hypothetical protein (GB: D26185_99) {Bacillus subtilis} | 30.2583 | 54.6125 | 831 |
| MG057 | 66249 | 65716 | GB: D26185_{—} | hypothetical protein (GB: D26185_104) {Bacillus subtilis} | 28.9017 | 28.9017 | 534 |
| | | | 104 | | | | |
| MG067 | 81047 | 82594 | GB: D00730_1 | glutamic acid specific protease (SPase) {Staphylococcus aureus} | 28.8462 | 48.0769 | 1548 |
| MG070 | 91065 | 91916 | SP: P34831 | ribosomal protein S2 (rpS2) {Spirulina platensis} | 34.8 | 55.2 | 852 |
| MG077 | 103104 | 104324 | SP: P24138 | oligopeptide transport system permease protein (oppB) {Bacillus | 28.0528 | 58.4158 | 1221 |
| | | | | subtilis} | | | |
| MG078 | 104320 | 105447 | SP: P26904 | oligopeptide transport system permease protein (dciAC) {Bacillus | 33.4572 | 55.0186 | 1128 |
| | | | | subtilis} | | | |
| MG079 | 105452 | 106657 | SP: P18765 | oligopeptide transport ATP-binding protein (amiE) {Streptococcus | 47.9412 | 67.9412 | 1206 |
| | | | | pneumoniae} | | | |
| MG081 | 109262 | 109672 | SP: P29395 | ribosomal protein L11 (RPL11) {Thermotoga maritima} | 51.7986 | 71.9424 | 411 |
| MG085 | 111790 | 112722 | PIR: S24760 | hydroxymethylglutaryl-CoA reductase (NADPH) {Nicotiana | 23.3216 | 49.1166 | 933 |
| | | | | sylvestris} | | | |
| MG086 | 112718 | 113863 | GB: L13259_2 | prolipoprotein diacylglyceryl transferase (lgt) {Salmonella | 29.1262 | 53.8835 | 1146 |
| | | | | typhimurium} | | | |
| MG091 | 117553 | 118032 | GB: U04997_2 | single-stranded DNA binding protein (ssb) {Haemophilus | 21.7949 | 41.6667 | 480 |
| | | | | influenzae} | | | |
| MG092 | 118025 | 118339 | GB: U14003_{—} | ribosomal protein S18 (rpS18) {Escherichia coli} | 45.4545 | 68.1818 | 315 |
| | | | 114 | | | | |
| MG093 | 118345 | 118794 | GB: M57623_1 | ribosomal protein L9 (rpL9) {Bacillus stearothermophilus} | 32.8859 | 56.3758 | 450 |
| MG099 | 125852 | 127282 | GB: M61151_1 | hydrolase (aux2) {Agrobacterium rhizogenes} | 32.1212 | 51.8182 | 1431 |
| MG106 | 134826 | 134149 | SP: P27251 | formylmethionine deformylase (def) {Escherichia coli} | 36.9369 | 68.4685 | 678 |
| MG107 | 134558 | 135334 | GB: L10328_14 | 5′guanylate kinase (gmk) {Escherichia coli} | 42.623 | 65.0273 | 777 |
| MG114 | 141345 | 142052 | GB: M12299_2 | phosphatidylglycerophosphate synthase (pgsA) {Escherichia coli} | 29.2994 | 57.3248 | 708 |
| MG118 | 143935 | 144954 | SP: P09147 | UDP-glucose 4-epimerase (galE) {Escherichia coli} | 34.0557 | 53.87 | 1020 |
| MG121 | 148238 | 149155 | SP: P32720 | hypothetical protein (SP: P32720) {Escherichia coli} | 30.8824 | 50.7353 | 918 |
| MG125 | 153081 | 153935 | GB: L10328_61 | hypothetical protein (GB: L10328_61) {Escherichia coli} | 31.9149 | 48.227 | 855 |
| MG126 | 154962 | 153922 | GB: M24068_1 | tryptophanyl-tRNA synthetase (trpS) {Bacillus subtilis} | 41.1585 | 61.5854 | 1041 |
| MG127 | 154998 | 155432 | SP: P19434 | hypothetical protein (SP: P19434) {Streptomyces | 25.9615 | 49.0385 | 435 |
| | | | | viridochromogenes} | | | |
| MG128 | 155443 | 156219 | GB: U00021_19 | hypothetical protein (GB: U00021_19) {Mycobacterium leprae} | 27.7027 | 49.3243 | 777 |
| MG129 | 156222 | 156572 | GB: U12340_1 | PTS glucose-specific permease {Bacillus stearothermophilus} | 25.4545 | 51.8182 | 351 |
| MG130 | 156565 | 158016 | GB: M91593_1 | hypothetical protein (GB: M91593_1) {Mycoplasma mycoides} | 30.6773 | 55.7769 | 1452 |
| MG131 | 158022 | 158243 | GB: M31161_3 | hypothetical protein (GB: M31161_3) {Spiroplasma citri} | 21.5909 | 56.8182 | 222 |
| MG132 | 159005 | 158583 | SP: P32083 | hypothetical protein (SP: P32083) {Mycoplasma hyorhinis} | 30.0971 | 56.3107 | 423 |
| MG136 | 160964 | 162431 | GB: D26185_{—} | lysyl-tRNA synthetase (lysS) {Bacillus subtilis} | 45.6212 | 68.4318 | 1470 |
| | | | 144 | | | | |
| UID | end5 | end3 | db_match | db_match name | per_id | per_sim | gene_len |
| MG137 | 162376 | 163587 | GP: L41518_4 | dTDP-4-dehydrorhamnose reductase (rfbD) {Klebsiella | 32.1622 | 55.9459 | 1212 |
| | | | | pneumoniae} | | | |
| MG139 | 165470 | 167176 | GB: L18927_2 | hypothetical protein (GB: L18927_2) {Buchnera aphidicola} | 28.5714 | 62.8571 | 1707 |
| MG143 | 182853 | 183188 | SP: P09170 | hypothetical protein (SP: P09170) {Escherichia coli} | 25 | 53.7037 | 336 |
| MG145 | 184055 | 184861 | GB: M35367_1 | protein X {Pseudomonas fluorescens} | 29.0698 | 48.4496 | 807 |
| MG148 | 187304 | 188530 | GB: L18965_6 | hypothetical protein (GB: L18965_6) {Thermophilic bacterial sp.} | 25.2874 | 52.8736 | 1227 |
| MG150 | 190048 | 190365 | SP: P38518 | ribosomal protein S10 (rpS10) {Thermotoga maritima} | 48.913 | 71.7391 | 318 |
| MG152 | 191145 | 191777 | SP: P28601 | ribosomal protein L4 (rpL4) {Bacillus stearothermophilus} | 39.2345 | 63.1579 | 633 |
| MG153 | 191784 | 192101 | SP: P04454 | ribosomal protein L23 (rpL23) {Bacillus stearothermophilus} | 38.7097 | 62.3656 | 318 |
| MG154 | 192104 | 192958 | SP: P04257 | ribosomal protein L2 (rpL2) {Bacillus stearothermophilus} | 58.7814 | 72.4014 | 855 |
| MG155 | 192961 | 193221 | GB: X02613_6 | ribosomal protein S19 (rpS19) {Escherichia coli} | 58.6207 | 77.0115 | 261 |
| MG156 | 193227 | 193658 | GB: M74770_4 | ribosomal protein L22 (rpL22) {Mycoplasma-like organism} | 49.0385 | 67.3077 | 432 |
| MG157 | 193664 | 194467 | SP: P02353 | ribosomal protein S3 (rpS3) {Mycoplasma capricolum} | 46.729 | 67.2897 | 804 |
| MG158 | 194476 | 194889 | SP: P02415 | ribosomal protein L16 (rpL16) {Mycoplasma capricolum} | 63.5037 | 78.1022 | 414 |
| MG159 | 194892 | 195491 | SP: P38514 | ribosomal protein L29 (rpL29) {Thermotoga maritima} | 41.6667 | 65 | 600 |
| MG160 | 195494 | 195748 | SP: P10131 | ribosomal protein S17 (rpS17) {Mycoplasma capricolum} | 51.1905 | 67.8571 | 255 |
| MG161 | 195755 | 196120 | SP: P04450 | ribosomal protein L14 (rpLl4) {Bacillus stearothermophilus} | 63.1148 | 86.0656 | 366 |
| MG162 | 196123 | 196446 | SP: P04455 | ribosomal protein L24 (rpL24) {Bacillus stearothermophilus) | 44.5783 | 66.2651 | 324 |
| MG163 | 196455 | 196994 | SP: P08895 | ribosomal protein L5 (rpL5) {Bacillus stearothermophilus} | 57.5419 | 77.095 | 540 |
| MG164 | 197000 | 197182 | GB: X06414_15 | ribosomal protein S14 (rpS14) {Mycoplasma capricolum} | 70.4918 | 83.6066 | 183 |
| MG165 | 197179 | 197601 | SP: P04446 | ribosomal protein S8 (rpS8) {Mycoplasma capricolum} | 46.875 | 71.0938 | 423 |
| MG166 | 197611 | 198162 | SP: P04448 | ribosomal protein L6 (rpL6) {Mycoplasma capricolum} | 46.9945 | 66.6667 | 552 |
| MG167 | 198167 | 198511 | GB: M57624_1 | ribosomal protein L18 (rpL18) {Bacillus stearothermophilus} | 42.9825 | 57.8947 | 345 |
| MG169 | 199160 | 199609 | SP: P10138 | ribosomal protein L15 (rpL15) {Mycoplasma capricolum} | 41.8919 | 66.2162 | 450 |
| MG170 | 199612 | 201036 | SP: P10250 | preprotein translocase secY subunit (secY) {Mycoplasma | 38.7892 | 68.1614 | 1425 |
| | | | | capricolum} | | | |
| MG171 | 201033 | 201674 | GB: M88104_2 | adenylate kinase (adk) {Bacillus stearothermophilus} | 32.2115 | 57.6923 | 642 |
| MG172 | 201680 | 202423 | GB: D00619_5 | methionine amino peptidase (map) {Bacillus subtilis} | 36.2903 | 58.4677 | 744 |
| MG173 | 202426 | 202635 | GB: M26414_1 | initiation factor 1 (infA) {Bacillus subtilis} | 48.5294 | 67.6471 | 210 |
| MG174 | 202649 | 202759 | SP: P38015 | ribosomal protein L36 (rpL36) {Chlamydia trachomatis} | 78.3784 | 83.7838 | 111 |
| MG177 | 203516 | 204499 | GB: M26414_5 | RNA polymerase alpha core subunit (rpoA) {Bacillus subtilis} | 39.3939 | 65.9933 | 984 |
| MG178 | 204515 | 204515 | GB: M26414_6 | ribosomal protein L17 (rpL17) {Bacillus subtilis} | 34.7826 | 59.1304 | 369 |
| MG179 | 204873 | 205694 | SP: P11599 | haemolysin secretion ATP-binding protein (hlyB) {Proteus vulgaris} | 34.5992 | 62.0253 | 822 |
| MG187 | 216762 | 218516 | GB: M77351_7 | ATP-bindingprotein(msmK) {Streptococcus mutans} | 40.5325 | 65.6805 | 1755 |
| MG188 | 218522 | 219508 | GB: M77351_4 | membrane protein (msmF) {Streptococcus mutans} | 22.4719 | 51.6854 | 987 |
| MG189 | 219435 | 220436 | GB: M77351_5 | membrane protein (msmG) {Streptococcus mutans} | 27.1429 | 52.8571 | 1002 |
| MG196 | 235635 | 236057 | GB: X16188_1 | translation initiation factor 1F3 (infC) {Bacillus stearothermophilus} | 31.3433 | 62.6866 | 423 |
| MG197 | 236063 | 236239 | PIR: S05347 | ribosomal protein L35 (rpL35) {Bacillus stearothermophilus} | 60 | 72.7273 | 177 |
| MG198 | 236245 | 236616 | SP: Q05427 | ribosomal protein L20 (rpL20) {Mycoplasma fermentans} | 57.5221 | 73.4513 | 372 |
| MG201 | 239163 | 239813 | GB: M84964_2 | heat shock protein (grpE) {Bacillus subtilis} | 31.677 | 49.6894 | 651 |
| MG205 | 245596 | 244568 | GB: M84964_1 | hypothetical protein (GB: M84964_1) {Bacillus subtilis} | 30.9942 | 58.1871 | 1029 |
| MG213 | 252579 | 253991 | GB: L09228_16 | hypothetical protein(GB: L09228_16) {Bacillus subtilis} | 27.1186 | 54.661 | 1413 |
| MG214 | 253978 | 254598 | GB: L09228_17 | hypothetical protein (GB: L09228_17) {Bacillus subtilis} | 34.8571 | 59.4286 | 621 |
| MG215 | 254620 | 255588 | SP: P20275 | 6-phosphofructokinase (pfk) {Spiroplasma citri} | 39.441 | 63.0435 | 969 |
| MG217 | 258040 | 259155 | SP: P29126 | bifunctional endo-1,4-beta-xylanase xyla precursor (xynA) | 37.5839 | 48.9933 | 1116 |
| | | | | {Ruminococcus flavefaciens} | | | |
| MG219 | 265596 | 266039 | GB: M87491_1 | IgAl protease {Haemophilus influenzae} | 32.2314 | 51.2397 | 444 |
| MG220 | 266382 | 266077 | GB: Z26883_1 | pre-procytotoxin (vacA) {Helicobacter pylori} | 36.1446 | 51.8072 | 306 |
| MG222 | 267080 | 268006 | GB: D10483_63 | hypothetical protein (GB: D10483_63){Escherichia coli} | 35.1974 | 56.5789 | 927 |
| MG224 | 269249 | 270355 | GB: U06462_1 | cell division protein (ftsZ) {Staphylococcus aureus} | 30.8824 | 50.7353 | 1107 |
| MG234 | 279491 | 279802 | GB: K02665_2 | ribosomal protein L27 (rpL27) {Bacillus subtilis} | 64.3678 | 80.4598 | 312 |
| MG235 | 279798 | 280670 | SP: P12638 | endonuclease IV (nfo) {Escherichia coli} | 29.368 | 51.3011 | 873 |
| MG245 | 293446 | 293940 | GB: M12965_1 | hypothetical protein (GB: M12965_1) {Escherichia coli} | 33.8462 | 56.9231 | 495 |
| MG247 | 295484 | 294768 | SP: P31056 | hypothetical protein (SP: P31056) {Escherichia coli} | 32.973 | 56.2162 | 717 |
| MG248 | 296127 | 295474 | GP: U17284_2 | major sigma factor (rpoD) {Listeria monocytogenes} | 28.4848 | 51.5152 | 654 |
| MG251 | 300802 | 299465 | GB: L08106_1 | glycyl-tRNA synthetase {Bombyx mori} | 35.8974 | 56.1772 | 1338 |
| MG252 | 301550 | 300825 | GP: Z33076_2 | rRNA methylase {Mycoplasma capricolum} | 38.8626 | 59.7156 | 726 |
| MG253 | 302839 | 301556 | GB: D26185_{—} | cysteinyl-tRNA synthetase (cysS) {Bacillus subtilis} | 34.3458 | 56.3084 | 1284 |
| | | | 156 | | | | |
| MG257 | 307635 | 307925 | GB: L19201_78 | ribosomal protein L31 (rpL31) {Escherichia coli} | 37.3134 | 61.194 | 291 |
| MG258 | 307928 | 309004 | GB: M11519_1 | peptide chain release factor 1 (RF-1) {Escherichia coli} | 43.1677 | 66.4596 | 1077 |
| MG259 | 309008 | 310375 | GB: D28567_2 | protoporphyrinogen oxidase (hemK) {Escherichia coli} | 30.5732 | 54.1401 | 1368 |
| MG260 | 310509 | 312803 | GB: Z32651_1 | hypothetical protein (GB: Z32651_1) {Mycoplasma pneumoniae} | 57.1429 | 71.4286 | 2295 |
| MG262 | 318330 | 319202 | GB: L11920_1 | DNA polymerase I (polI) {Mycobacterium tuberculosis} | 29.9419 | 47.9651 | 873 |
| MG264 | 321044 | 321637 | GB: M64324_1 | 6-phosphogluconate dehydrogenase (gnd) {Escherichia coli} | 29.8507 | 47.7612 | 594 |
| MG265 | 322412 | 321579 | GB: L10328_61 | hypothetical protein (GB: L10328_61) {Escherichia coli} | 27.193 | 48.6842 | 834 |
| MG268 | 325877 | 325194 | GB: U01881_2 | deoxyguanosine/deoxyadenosine kinase(I) subunit 2 {Lactobacillus | 29.5181 | 49.3976 | 684 |
| | | | | acidophilus} | | | |
| MG270 | 328442 | 327435 | GB: U14003_{—} | hypothetical protein (GB: U14003_297) {Escherichia coli} | 38.2838 | 57.7558 | 1008 |
| | | | 297 | | | | |
| MG272 | 330984 | 329833 | GB: M81753_3 | dihydrolipoamide acetyltransferase (pdhC) {Acholeplasma | 45.1524 | 62.0499 | 1152 |
| | | | | laidlawii} | | | |
| MG273 | 332214 | 331237 | GB: M81753_2 | pyruvate dehydrogenase E1-beta subunit (pdhB) {Acholeplasma | 55.0314 | 76.7296 | 978 |
| | | | | laidlawii} | | | |
| MG274 | 333308 | 332235 | GB: M81753_1 | pyruvate dehydrogenase E1-alpha subunit (pdhA) {Acholeplasma | 42.9825 | 61.1111 | 1074 |
| | | | | laidlawii} | | | |
| MG277 | 338323 | 335414 | GB: L16960_2 | spore germination apparatus protein (gerBB) {Bacillus subtilis} | 31.2 | 55.2 | 2910 |
| MG280 | 341920 | 341177 | GB: Z35086_1 | sensory rhodopsin II transducer (htrII) {Natronobacterium | 15.7143 | 46.6667 | 744 |
| | | | | pharaonis } | | | |
| MG288 | 353034 | 351793 | GB: L04466_1 | protein L {Peptostreptococcus magnus} | 31.1475 | 50.8197 | 1242 |
| MG290 | 355119 | 355853 | SP: P15361 | ATP-binding protein P29 {Mycoplasma hyorhinis} | 32.3009 | 58.8496 | 735 |
| MG292 | 360592 | 357893 | GB: J01581_1 | alanyl-tRNA synthetase (alaS) {Escherichia coli} | 33.8403 | 55.64 | 2700 |
| MG295 | 364022 | 362922 | SP: P25745 | hypothetical protein (SP: P25745) {Escherichia coli} | 34.7107 | 57.0248 | 1101 |
| MG299 | 369694 | 368735 | SP: P39646 | phosphotransacetylase (pta) {Clostridium acetobutylicum} | 44.6541 | 63.522 | 960 |
| MG303 | 373998 | 372928 | GB: M61017_1 | membrane transport protein (glnQ) {Bacillus stearothermophilus} | 31.982 | 54.955 | 1071 |
| MG304 | 374741 | 373983 | GB: U13043_1 | membrane associated ATPase (cbiO) {Propionibacterium | 30.0448 | 53.8117 | 759 |
| | | | | freudenreichii} | | | |
| MG310 | 386462 | 387265 | GB: D11037_1 | proline iminopeptidase (pip) {Bacillus coagulans} | 29.2079 | 51.4851 | 804 |
| MG311 | 387892 | 387278 | GB: M59358_1 | ribosomal protein S4 (rpS4) {Bacillus subtilis} | 43 | 65.5 | 615 |
| MG313 | 392023 | 391397 | GP: L38997_5 | cytadherence-accessory protein (hmwl) {Mycoplasma pneumoniae} | 53.8462 | 79.8077 | 627 |
| MG315 | 394550 | 393660 | GP: L38997_3 | cytadherence accessory protein (hmwl) {Mycoplasma pneumoniae} | 44.3878 | 69.898 | 891 |
| MG316 | 395583 | 394477 | GB: L15202_4 | competence locus E (comE3) {Bacillus subtilis} | 30.4933 | 52.4664 | 1107 |
| MG322 | 405398 | 403725 | GB: D17462_11 | Na+ATPase subunit J (ntpJ) {Enterococcus hirae} | 31.0811 | 56.3063 | 1674 |
| MG323 | 405455 | 406135 | GB: D37799_6 | hypothetical protein (GB: D37799_6) {Bacillus subtilis} | 27.5701 | 54.2056 | 681 |
| MG325 | 408953 | 408795 | SP: P23375 | ribosomal protein L33 (rpL33) {Bacillus stearothermophilus} | 58.1395 | 69.7674 | 159 |
| MG326 | 409857 | 408973 | GB: Z18629_1 | hypothetical protein (GB: Z18629_1) {Bacillus subtilis} | 27.0758 | 52.7076 | 885 |
| MG329 | 414318 | 412975 | GB: U00021_5 | hypothetical protein (GB: U00021_5) {Mycobacterium leprae} | 32.1839 | 54.2529 | 1344 |
| MG332 | 416329 | 415613 | GB: D10165_3 | hypothetical protein (GB: D10165_3) {Escherichia coli} | 26.9231 | 49.1453 | 717 |
| MG346 | 443922 | 444419 | GB: M65289_3 | hypothetical protein (GB: M65289_3) {Bacillus stearothermophilus} | 37.9747 | 60.1266 | 498 |
| MG347 | 444413 | 445042 | SP: P32049 | hypothetical protein (SP: P32049) {Escherichia coli} | 28.4615 | 46.9231 | 630 |
| MG351 | 449665 | 450216 | SP: P37981 | inorganic pyrophosphatase (ppa) {Thermoplasma acidophilum} | 38.8535 | 61.7834 | 552 |
| MG355 | 453757 | 451616 | GB: M29364_2 | ATP-dependent protease binding subunit (clpB) {Escherichia coli} | 47.7337 | 70.6799 | 2142 |
| MG356 | 454753 | 453914 | GB: M27280_1 | lic-1 operon protein (licA) {Haemophilus influenzae} | 27.7778 | 56.25 | 840 |
| MG359 | 457347 | 458267 | GB: M21298_2 | Holliday junction DNA helicase (ruvB) {Escherichia coli} | 34.6939 | 64.966 | 921 |
| MG360 | 459495 | 458263 | SP: P14303 | UV protection protein (mucB) {Salmonella typhimurium} | 22.0859 | 48.1595 | 1233 |
| MG363 | 460497 | 460667 | GB: M29698_2 | ribosomal protein L32 (rpL32) {Escherichia coli} | 48.1481 | 62.963 | 171 |
| MG364 | 461015 | 461686 | GB: M95954_1 | mobilization protein (mobl3) {Leuconostoc oenos} | 30.8725 | 53.6913 | 672 |
| MG367 | 465434 | 464649 | GB: X02673_1 | ribonuclease III (mc) {Escherichia coli} | 30.1724 | 65.5172 | 786 |
| MG380 | 478999 | 479574 | GB: L10328_105 | glucose inhibited division protein (gidB) {Escherichia coli} | 24.8276 | 51.7241 | 576 |
| MG382 | 480691 | 481329 | SP: P31218 | uridine kinase (udk) {Escherichia coli} | 34.4828 | 62.5616 | 639 |
| MG383 | 482075 | 481332 | GB: M15811_1 | sporulation protein (outB) {Bacillus subtilis} | 36.3636 | 54.9784 | 744 |
| MG384 | 483369 | 482071 | GB: M24537_2 | GTP-binding protein (obg) {Bacillus subtilis} | 39.627 | 62.0047 | 1299 |
| MG387 | 490711 | 489842 | SP: P37214 | GTP-binding protein era homolog (spg) {Streptococcus mutans} | 27.3859 | 51.0373 | 870 |
| MG396 | 500719 | 500264 | GB: M80797_2 | galactosidase acetyltransferase (lacA) {Streptococcus mutans} | 40.5797 | 57.971 | 456 |
| MG398 | 502823 | 502425 | SP: P33255 | ATP synthase epsilon chain (atpC) {Mycoplasma gallisepticum} | 36.9231 | 55.3846 | 399 |
| MG402 | 507201 | 506674 | SP: P33254 | ATP synthase delta chain (atpH) {Mycoplasma gallisepticum} | 33.9181 | 58.4795 | 528 |
| MG403 | 507820 | 507197 | SP: P33256 | ATP synthase B chain (atpF) {Mycoplasma gallisepticum} | 36.5979 | 66.4948 | 624 |
| MG404 | 508131 | 507826 | SP: P33258 | ATP synthase C chain (atpE) {Mycoplasma gallisepticum} | 50 | 74.359 | 306 |
| MG407 | 510836 | 509463 | GB: L29475_4 | enolase (eno) {Bacillus subtilis} | 54.0793 | 74.1259 | 1374 |
| MG408 | 510903 | 511373 | SP: P14930 | pilin repressor (pilB) {Neisseria gonorrhoeae} | 49.2188 | 68.75 | 471 |
| MG409 | 512050 | 511376 | GB: L10328_88 | peripheral membrane protein U (phoU) {Escherichia coli} | 27.027 | 48.6486 | 675 |
| MG420 | 524144 | 523365 | GB: D26185_83 | DNA polymerase III subunit (dnaH) {Bacillus subtilis} | 49.115 | 68.5841 | 780 |
| MG424 | 531479 | 531222 | SP: P05766 | ribosomal protein S15 (BS18) {Bacillus stearothermophilus} | 48.1481 | 71.6049 | 258 |
| MG426 | 533040 | 533231 | GB: L12244_2 | ribosomal protein L28 (rpL28) {Bacillus subtilis} | 36.0656 | 59.0164 | 192 |
| MG429 | 536036 | 534321 | GB: M69050_2 | PEP-dependent HPr protein kinase phosphoryltransferase (ptsI) | 46.4789 | 66.5493 | 1716 |
| | | | | {Staphylococcus carnosus} | | | |
| MG430 | 537563 | 536043 | GB: L29475_3 | phosphoglycerate mutase (pgm) {Bacillus subtilis} | 45.1866 | 62.4754 | 1521 |
| MG432 | 539546 | 538353 | SP: P27712 | hypothetical protein (SP: P27712) {Spiroplasma citri} | 28.436 | 48.8152 | 1194 |
| MG433 | 539632 | 540525 | GB: M31161_2 | elongation factor Ts (tsf) {Spiroplasma citri} | 39.0572 | 62.6263 | 894 |
| MG434 | 540848 | 541237 | GB: D26562_56 | mukB suppressor protein (smbA) {Escherichia coli} | 40.8696 | 61.7391 | 390 |
| MG435 | 541240 | 541788 | GB: D26562_57 | ribosome releasing factor (frr) {Escherichia coli} | 34.9112 | 57.3965 | 549 |
| MG438 | 543004 | 544152 | GB: J01631_1 | restriction-modification enzyme EcoD specificity subunit (hsdS) | 24.5734 | 45.7338 | 1149 |
| | | | | {Escherichia coli} | | | |
| MG442 | 547690 | 546881 | GB: U00021_5 | hypothetical protein (GB: U00021_5) {Mycobacterium leprae} | 26.8966 | 42.069 | 810 |
| MG443 | 548849 | 547665 | GB: D16311_1 | hypothetical protein (GB: D16311_1) {Bacillus subtilis} | 26.1818 | 52 | 1185 |
| MG444 | 549224 | 548868 | SP: P30529 | ribosomal protein L19 (rpL19) {Bacillus stearothermophilus} | 49.1071 | 69.6429 | 357 |
| MG445 | 549903 | 549211 | SP: P36245 | tRNA (guanine-N1)-methyltransferase (trmD) {Salmonella | 40.8072 | 64.1256 | 693 |
| | | | | typhimurium} | | | |
| MG446 | 550172 | 549906 | SP: P21474 | ribosomal protein S16 (BS17) {Bacillus subtilis} | 48.7805 | 64.6341 | 267 |
| MG448 | 552897 | 552448 | GB: Z33052_1 | pilin repressor (pilB) {Mycoplasma capricolum} | 53.4884 | 72.093 | 450 |
| MG454 | 557770 | 557306 | SP: P23929 | osmotically inducible protein (osmC) {Escherichia coli} | 28.4091 | 51.1364 | 465 |
| MG457 | 562602 | 560497 | GB: D26185_{—} | cell division protein (ftsH) {Bacillus subtilis} | 49.7445 | 68.1431 | 2106 |
| | | | 132 | | | | |
| MG461 | 566203 | 564929 | GB: X73124_94 | hypothetical protein (GB: X73124_94) {Bacillus subtilis} | 40 | 64.2857 | 1275 |
| MG464 | 569554 | 568400 | GB: D14982_3 | hypothetical protein (GB: D14982_3) {Mycoplasma capricolum} | 32.3699 | 53.7572 | 1155 |
| MG465 | 569912 | 569529 | GB: D14982_2 | RNaseP C5 subunit (rnpA) {Mycoplasma capricolum} | 40 | 58.75 | 384 |
| MG466 | 570027 | 569884 | GB: L10328_67 | ribosomal protein L34 (rpL34) {Escherichia coli} | 67.3913 | 80.4348 | 144 |
| MG470 | 580030 | 579224 | GB: D26185_55 | SpoOJ regulator {Bacillus subtilis} | 27.8884 | 53.3865 | 807 |

[0277] TABLE 1(b)

| UID | end5 | end3 | db_match | db_match name | per_sim | per_id | match_info |
|---|---|---|---|---|---|---|---|
| MG002 | 1829 | 2758 | SP: P35514 | heat shock protein (dnaJ) {Lactococcus | 40 | 61.6667 | MG002(1-930 of 930) |
| | | | | lactis} | | | GB: U09251(298-1227 of 6140) |
| MG003 | 2846 | 4795 | GB: U09251_3 | DNA gyrase subunit B (gyrB) {Mycoplasma | 99.3846 | 99.3846 | MG003(1-1950 of 1950) |
| | | | | genitalium} | | | GB: U09251(1315-3264 |
| | | | | | | | of 6140) |
| MG004 | 4813 | 7320 | GB: U09251_4 | DNA gyrase subunit A (gyrA) {Mycoplasma | 99.8804 | 99.8804 | MG004(1-2508 of 2508) |
| | | | | genitalium} | | | GB: U09251(3282-5789 |
| | | | | | | | of 6140) |
| MG191 | 221571 | 225902 | SP: P20796 | attachment protein, MgPa operon (mgp) | 100 | 100 | MG191(1-4332 of 4332) |
| | | | | {Mycoplasma genitalium} | | | GB: M31431(1066-5397 |
| | | | | | | | of 8760) |
| MG192 | 225907 | 229062 | SP: P22747 | 114 kDa protein, MgPa operon (mgp) | 100 | 100 | MG192(1-3156 of 3156) |
| | | | | {Mycoplasma genitalium} | | | GB: M31431(5402-8557 |
| | | | | | | | of 8760) |
| MG232 | 278904 | 279203 | SP: P26908 | ribosomal protein L21 (rpL21) {Bacillus | 37.8947 | 65.2632 | MG232(1-300 of 300) |
| | | | | subtilis} | | | GB: U02141(138-437 of 827) |
| MG233 | 279199 | 279495 | GP: U02141_2 | ribosomal protein L21 homolog | 100 | 100 | MG233(1-297 of 297) |
| | | | | {Mycoplasma genitalium} | | | GB: U02141(433-729 of 827) |
| MG287 | 348882 | 349133 | SP: P04686 | nodulation protein F (nodE) {Rhizobium | 34.9398 | 56.6265 | MG287(1-252 of 252) |
| | | | | leguminosarum} | | | GB: U01810(152-403 of 917) |
| MG417 | 521868 | 521473 | SP: P07842 | ribosomal protein S9 (rpS9) {Bacillus | 51.9685 | 71.6535 | MG417(1-396 of 396 |
| | | | | stearothermophilus} | | | GB: U01744(127-522 of 620) |

[0278] TABLE 1(c)

| UID | end5 | end3 | db_match | db_match name | per_sim | per_id | match_info |
|---|---|---|---|---|---|---|---|
| MG001 | 1026 | 1826 | GB: U09251_1 | DNA polymerase III beta subunit (dnaN) | 100 | 100 | MG001(507-801 of |
| | | | | {Mycoplasma genitalium} | | | 801) GB: U09251 |
| | | | | | | | (1-295 of 6140) |
| MG005 | 7295 | 8545 | GB: D26185_77 | seryl-tRNA synthetase (serS) {Bacillus subtilis} | 42.615 | 66.3438 | MG005(1-377 |
| | | | | | | | of 1251) |
| | | | | | | | GB: U09251(5764- |
| | | | | | | | 6140 of 6140) |
| MG005 | 7295 | 8545 | GB: D26185_77 | seryl-tRNA synthetase (serS) {Bacillus subtilis} | 42.615 | 66.3438 | MG005(16-337 |
| | | | | | | | of 1251) |
| | | | | | | | GB: U02210(1-322 |
| | | | | | | | of 322) |
| MG007 | 9157 | 9918 | GB: D26185_83 | DNA polymerase III subunit (dnaH) {Bacillus subtilis} | 22.695 | 45.3901 | MG007(762-711 |
| | | | | | | | of 762) |
| | | | | | | | GB: U02216(270- |
| | | | | | | | 321 of 321) |
| MG008 | 9924 | 11249 | GB: D26185_60 | thiophene and furan oxidizer (tdhF) {Bacillus subtilis} | 31.9101 | 59.7753 | MG008(264-1 |
| | | | | | | | of 1326) |
| | | | | | | | GB: U02216(1-264 |
| | | | | | | | of 321) |
| MG011 | 13565 | 12705 | — | — | — | — | MG011(473-767 |
| | | | | | | | of 861) |
| | | | | | | | GB: U02257(2- |
| | | | | | | | 296 of 296) |
| MG014 | 15556 | 17424 | SP: P27299 | transport ATP-binding protein (msbA) {Escherichia coli} | 28.0702 | 52.6316 | MG014(1005-678 |
| | | | | | | | of 1869) |
| | | | | | | | GB: U02235(1- |
| | | | | | | | 326 of 326) |
| MG018 | 21063 | 22343 | SP: P32333 | helicase (motl) {Saccharomyces cerevisiae} | 36.6972 | 60.0917 | MG018(1281-1067 |
| | | | | | | | of 1281) |
| | | | | | | | GB: U01723(89- |
| | | | | | | | 304 of 304) |
| MG018 | 21063 | 22343 | SP: P32333 | helicase (mot1) {Saccharomyces cerevisiae} | 36.6972 | 60.0917 | MG018(409-105 |
| | | | | | | | of 1281) |
| | | | | | | | GB: U02179(1- |
| | | | | | | | 305 of 305) |
| MG018 | 21063 | 22343 | SP: P32333 | helicase (mot1) {Saccharomyces cerevisiae} | 36.6972 | 60.0917 | MG018(592-896 |
| | | | | | | | of 1281) |
| | | | | | | | GB: U01757(1- |
| | | | | | | | 305 of 305) |
| MG019 | 22388 | 23554 | SP: P35514 | heat shock protein (dnaJ) {Lactococcus lactis} | 33.9779 | 51.105 | MG019(44-1 |
| | | | | | | | of 1167) |
| | | | | | | | GB: U01723(1- |
| | | | | | | | 44 of 304) |
| MG020 | 23541 | 24464 | GB: Z25461_2 | proline iminopeptidase (pip) {Neisseria gonorrhoeae} | 37.5439 | 55.7895 | MG020(723-924 |
| | | | | | | | of 924) |
| | | | | | | | GB: U02229(1- |
| | | | | | | | 202 of 333) |
| MG021 | 24467 | 26002 | GB: D26185_101 | methionyl-tRNA synthetase (metS) {Bacillus subtilis} | 37.5494 | 58.8933 | MG021(1-129 |
| | | | | | | | of 1536) |
| | | | | | | | GB: U02229(205- |
| | | | | | | | 333 of 333) |
| MG021 | 24467 | 26002 | GB: D26185_101 | methionyl-tRNA synthetase (metS) {Bacillus subtilis} | 37.5494 | 58.8933 | MG021(1318-1527 |
| | | | | | | | of 1536) |
| | | | | | | | GB: X61513(1-209 |
| | | | | | | | of 209) |
| MG022 | 26035 | 26469 | GB: M21677_1 | RNA polymerase delta subunit (rpoE) {Bacillus subtilis} | 28.6765 | 49.2647 | MG022(254-1 |
| | | | | | | | of 435) |
| | | | | | | | GB: U01721(1-254 |
| | | | | | | | of 299) |
| MG025 | 28651 | 29544 | GP: Z47767_4 | TrsB {Yersinia enterocolitica} | 27.551 | 54.0816 | MG025(514-894 |
| | | | | | | | of 894) |
| | | | | | | | GB: U02253(1-381 |
| | | | | | | | of 649) |
| MG026 | 29551 | 30120 | GB: U14003_62 | elongation factor P (efp) {Escherichia coli} | 26.3804 | 47.2393 | MG026(1-262 |
| | | | | | | | of 570) |
| | | | | | | | GB: U02253(388- |
| | | | | | | | 649 of 649) |
| MG029 | 31702 | 31145 | GB: L19300_1 | hypothetical protein (GB: L19300_1) | 27.027 | 45.045 | MG029(1-93 |
| | | | | {Staphylococcus aureus} | | | of 558) GB: U01773 |
| | | | | | | | (210-302 of 302) |
| MG030 | 32324 | 31707 | GB: Z27121_3 | uracil phosphoribosyltransferase (upp) | 44.9275 | 66.6667 | MG030(414-618 |
| | | | | {Mycoplasma hominis} | | | of 618) GB: |
| | | | | | | | U01773(1-205 |
| | | | | | | | of 302) |
| MG031 | 36713 | 32361 | GB: U06833_1 | DNA polymerase III (polC) | 38.0303 | 59.3182 | MG031(1473-1701 |
| | | | | {Mycoplasma pulmonis} | | | of 4353) GB: |
| | | | | | | | U01807(1- |
| | | | | | | | 229 of 229) |
| MG031 | 36713 | 32361 | GB: U06833_1 | DNA polymerase III (polC) | 38.0303 | 59.3182 | MG031(2923-3309 |
| | | | | {Mycoplasma pulmonis} | | | of 4353) GB: |
| | | | | | | | U01712(1- |
| | | | | | | | 387 of 387) |
| MG031 | 36713 | 32361 | GB: U06833_1 | DNA polymerase III (polC) {Mycoplasma pulmonis} | 38.0303 | 59.3182 | MG031(3330- |
| | | | | | | | 3676 of 4353) |
| | | | | | | | GB: U02208(1- |
| | | | | | | | 347 of 347) |
| MG036 | 41777 | 43426 | SP: P36419 | aspartyl-tRNA synthetase (aspS) {Thermus aquaticus} | 40.8582 | 62.8731 | MG036(1115- |
| | | | | | | | 1650 of 1650) |
| | | | | | | | GB: U01814(1- |
| | | | | | | | 532 of 1006) |
| MG036 | 41777 | 43426 | SP: P36419 | aspartyl-tRNA synthetase (aspS) {Thermus aquaticus} | 40.8582 | 62.8731 | MG036(1407- |
| | | | | | | | 1638 of 1650) |
| | | | | | | | GB: X61511(1- |
| | | | | | | | 232 of 232) |
| MG036 | 41777 | 43426 | SP: P36419 | aspartyl-tRNA synthetase (aspS) {Thermus aquaticus} | 40.8582 | 62.8731 | MG036(1412- |
| | | | | | | | 1160 of 1650) |
| | | | | | | | GB: X61523(1- |
| | | | | | | | 252 of 252) |
| MG037 | 43402 | 44751 | GP: U02020_1 | pre-B cell enhancing factor (PBEF) {Homo sapiens} | 34.3164 | 52.2788 | MG037(1- |
| | | | | | | | 500 of 1350) |
| | | | | | | | GB: U01814(508- |
| | | | | | | | 1006 of 1006) |
| MG040 | 47581 | 49353 | SP: P29724 | membrane lipoprotein (tmpC) {Treponema pallidum} | 30.8594 | 48.0469 | MG040(1341- |
| | | | | | | | 1552 of 1773) |
| | | | | | | | GB: U02125(1- |
| | | | | | | | 212 of 212) |
| MG045 | 53205 | 54653 | — | — | — | — | MG045(381- |
| | | | | | | | 4 of 1449) |
| | | | | | | | GB: U02166(1- |
| | | | | | | | 378 of 378) |
| MG047 | 55589 | 56737 | SP: P30869 | S-adenosylmethionine synthetase 2 (metX) | 43.6111 | 60.5556 | MG047(787- |
| | | | | {Escherichia coli} | | | 1070 of 1149) |
| | | | | | | | GB: U02123(1- |
| | | | | | | | 284 of 284) |
| MG051 | 59741 | 61003 | GB: L13289_3 | thymidine phosphorylase (deoA) {Mycoplasma pirum} | 52.7316 | 73.6342 | MG051(1161- |
| | | | | | | | 1263 of 1263) |
| | | | | | | | GB: U02191(1- |
| | | | | | | | 103 of 183) |
| MG052 | 61015 | 61404 | GB: L13289_4 | cytidine deaminase (cdd) {Mycoplasma pirum} | 38.2114 | 64.2276 | MG052(1- |
| | | | | | | | 69 of 390) |
| | | | | | | | GB: U02191(115- |
| | | | | | | | 183 of 183) |
| MG052 | 61015 | 61404 | GB: L13289_4 | cytidine deaminase (cdd) {Mycoplasma pirum} | 38.2114 | 64.2276 | MG052(320- |
| | | | | | | | 390 of 390) |
| | | | | | | | GB: U02108(1- |
| | | | | | | | 71 of 212) |
| MG053 | 61407 | 63056 | GB: L13289_5 | phosphomannomutase (cpsG) {Mycoplasma pirum} | 38.7868 | 58.0882 | MG053(1- |
| | | | | | | | 140 of 1650) |
| | | | | | | | GB: U02108(74- |
| | | | | | | | 212 of 212) |
| MG054 | 63986 | 63039 | GB: D13303_4 | transcription antitermination factor (nusG) | 30.8571 | 51.4286 | MG054(688- |
| | | | | {Bacillus subtilis} | | | 44 of 948) |
| | | | | | | | GB: U01710(1- |
| | | | | | | | 645 of 645) |
| MG054 | 63986 | 63039 | GB: D13303_4 | transcription antitermination factor (nusG) | 30.8571 | 51.4286 | MG054(948- |
| | | | | {Bacillus subtilis} | | | 719 of 948) |
| | | | | | | | GB: U02236(45- |
| | | | | | | | 274 of 276) |
| MG055 | 64361 | 63993 | — | — | — | — | MG055(1- |
| | | | | | | | 326 of 369) |
| | | | | | | | GB: U02240(23- |
| | | | | | | | 348 of 348) |
| MG058 | 67121 | 66231 | GB: D26185_114 | phosphoribosylpyrophosphate synthetase (prs) | 44.4089 | 63.5783 | MG058(72 - |
| | | | | {Bacillus subtilis} | | | 1 of 891) |
| | | | | | | | GB: U01693(1- |
| | | | | | | | 72 of 350) |
| MG059 | 67644 | 67210 | GB: D12501_1 | small protein (smpB) {Escherichia coli} | 32.5581 | 62.0155 | MG059(435- |
| | | | | | | | 247 of 435) |
| | | | | | | | GB: U01693(161- |
| | | | | | | | 350 of 350) |
| MG060 | 67651 | 68541 | SP: P26401 | lipopolysaccharide biosynthesis protein (rfbV) | 36.0656 | 59.8361 | MG060(723- |
| | | | | {Salmonella typhimurium} | | | 396 of 891) |
| | | | | | | | GB: U02262(1- |
| | | | | | | | 328 of 328) |
| MG061 | 69908 | 68526 | GB: M89480_4 | hexosephosphate transport protein (uhpT) | 30.9091 | 57.2727 | MG061(1273- |
| | | | | {Salmonellatyphimurium} | | | 613 of 1383) |
| | | | | | | | GB: U01705(1- |
| | | | | | | | 661 of 661) |
| MG062 | 70531 | 72570 | SP: P20966 | fructose-permease IIBC component (fruA) | 42.723 | 60.5634 | MG062(439- |
| | | | | {Escherichia coli} | | | 761 of 2040) |
| | | | | | | | GB: U02138(1- |
| | | | | | | | 323 of 323) |
| MG063 | 72668 | 73432 | SP: P23539 | 1-phosphofructokinase (fruK) {Escherichia coli} | 26.3158 | 51.5038 | MG063(363- |
| | | | | | | | 626 of 765) |
| | | | | | | | GB: U01777(1- |
| | | | | | | | 264 of 264) |
| MG065 | 77686 | 79083 | GB: X75422_1 | heterocyst maturation protein (devA) {Anabaena sp.} | 35.2941 | 59.7285 | MG065(1398- |
| | | | | | | | 1176 of 1398) |
| | | | | | | | GB: U02154(133- |
| | | | | | | | 354 of 354) |
| MG066 | 79090 | 81033 | SP: P27302 | transketolase 1 (TK 1) (tktA) | 32.5617 | 54.9383 | MG066(126- |
| | | | | {Escherichia coli} | | | 1 of 1944) |
| | | | | | | | GB: U02154(1- |
| | | | | | | | 126 of 354) |
| MG068 | 82621 | 84042 | — | — | — | — | MG068(1244- |
| | | | | | | | 919 of 1422) |
| | | | | | | | GB: U02162(1- |
| | | | | | | | 326 of 326) |
| MG069 | 88228 | 90951 | SP: P20166 | phosphotransferase enzyme II, ABC component (ptsG) | 43.1596 | 61.0749 | MG069(1127- |
| | | | | {Bacillus subtilis} | | | 849 of 2724) |
| | | | | | | | GB: U02207(l- |
| | | | | | | | 279 of 279) |
| MG071 | 91924 | 94545 | SP: P37278 | cation-transporting ATPase (pacL) | 34.3897 | 57.277 | MG071(1470- |
| | | | | {Synechococcus sp.} | | | 1209 of 2622) |
| | | | | | | | GB: X61532(1- |
| | | | | | | | 262 of 262) |
| MG072 | 94535 | 96952 | GB: D10279_2 | preprotein translocase (secA) {Bacillus subtilis} | 43.6601 | 66.7974 | MG072(2269- |
| | | | | | | | 2418 of 2418) |
| | | | | | | | GB: U01743(1- |
| | | | | | | | 150 of 365) |
| MG073 | 96933 | 98900 | SP: P07025 | excinuclease ABC subunit B (uvrB) | 47.9751 | 67.2897 | MG073(1- |
| | | | | {Escherichia coli} | | | 235 of 1968) |
| | | | | | | | GB: U01743(131- |
| | | | | | | | 365 of 365) |
| MG073 | 96933 | 98900 | SP: P07025 | excinuclease ABC subunit B (uvrB) | 47.9751 | 67.2897 | MG073(1584- |
| | | | | {Escherichia coli} | | | 1240 of 1968) |
| | | | | | | | GB: U01698(1- |
| | | | | | | | 345 of 345) |
| MG073 | 96933 | 98900 | SP: P07025 | excinuclease ABC subunit B (uvrB) | 47.9751 | 67.2897 | MG073(305- |
| | | | | {Escherichia coli} | | | 694 of 1968) |
| | | | | | | | GB: U02119(1- |
| | | | | | | | 391 of 391) |
| MG074 | 98906 | 99316 | — | — | — | — | MG074(369- |
| | | | | | | | 411 of 411) |
| | | | | | | | GB: U01715(1- |
| | | | | | | | 43 of 576) |
| MG075 | 99383 | 102454 | — | — | — | — | MG075(1- |
| | | | | | | | 467 of 3072) |
| | | | | | | | GB: U01715(110- |
| | | | | | | | 576 of 576) |
| MG075 | 99383 | 102454 | — | — | — | — | MG075(1206- |
| | | | | | | | 804 of 3072) |
| | | | | | | | GB: U02251(1- |
| | | | | | | | 403 of 403) |
| MG075 | 99383 | 102454 | — | — | — | — | MG075(1927- |
| | | | | | | | 2210 of 3072) |
| | | | | | | | GB: U01749(1- |
| | | | | | | | 284 of 284) |
| MG075 | 99383 | 102454 | — | — | — | — | MG075(2841- |
| | | | | | | | 2422 of 3072) |
| | | | | | | | GB: U01775(1- |
| | | | | | | | 420 of 420) |
| MG080 | 106660 | 109203 | SP: P18766 | oligopeptide transport ATP-binding protein (amiF) | 46.6403 | 67.1937 | MG080(2268- |
| | | | | {Streptococcus pneumoniae} | | | 1954 of 2544) |
| | | | | | | | GB: U02129(1- |
| | | | | | | | 315 of 315) |
| MG080 | 106660 | 109203 | SP: P18766 | oligopeptide transport ATP-binding protein (amiF) | 46.6403 | 67.1937 | MG080(951- |
| | | | | {Streptococcus pneumoniae} | | | 646 of 2544) |
| | | | | | | | GB: U01758(1- |
| | | | | | | | 306 of 306) |
| MG082 | 109675 | 110352 | SP: P04447 | ribosomal protein L1 (rpL1) | 48.1982 | 67.5676 | MG082(446- |
| | | | | {Bacillus stearothermophilus} | | | 170 of 678) |
| | | | | | | | GB: U02113(1- |
| | | | | | | | 278 of 278) |
| MG083 | 110355 | 110921 | GB: L32144_1 | peptidyl-tRNA hydrolase homolog (pth) | 38.2166 | 57.3248 | MG083(567- |
| | | | | {Borrelia burgdorferi} | | | 220 of 567) |
| | | | | | | | GB: U02185(26- |
| | | | | | | | 373 of 373) |
| MG084 | 110917 | 111786 | SP: P37563 | hypothetical protein (SP: P37563) | 28.125 | 46.3542 | MG084(30- |
| | | | | {Bacillus subtilis} | | | 1 of 870) |
| | | | | | | | GB: U02185(1- |
| | | | | | | | 30 of 373) |
| MG084 | 110917 | 111786 | SP: P37563 | hypothetical protein (SP: P37563) {Bacillus subtilis} | 28.125 | 46.3542 | MG084(794- |
| | | | | | | | 870 of 870) |
| | | | | | | | GB: U01783(1- |
| | | | | | | | 77 of 269) |
| MG087 | 113895 | 114311 | SP: P09901 | ribosomal protein S12 (rpS12) | 75.3731 | 82.0896 | MG087(417- |
| | | | | {Bacillus stearothermophilus} | | | 349 of 417) |
| | | | | | | | GB: U02212(326- |
| | | | | | | | 394 of 394) |
| MG088 | 114331 | 114795 | SP: P22744 | ribosomal protein S7 (rpS7) | 64.9351 | 81.1688 | MG088(305- |
| | | | | {Bacillus stearothermophilus} | | | 1 of 465) |
| | | | | | | | GB: U02212(2- |
| | | | | | | | 306 of 394) |
| MG089 | 114808 | 116871 | SP: P13551 | elongation factor G (fus) | 59.2105 | 78.0702 | MG089(1878- |
| | | | | {Thermus aquaticus} | | | 1540 of 2064) |
| | | | | | | | GB: U02180(1- |
| | | | | | | | 339 of 340) |
| MG089 | 114808 | 116871 | SP: P13551 | elongation factor G (fus) {Thermus aquaticus} | 59.2105 | 78.0702 | MG089(1885- |
| | | | | | | | 2064 of 2064) |
| | | | | | | | GB: U02136(1- |
| | | | | | | | 180 of 410) |
| MG089 | 114808 | 116871 | SP: P13551 | elongation factor G (fus) {Thermus aquaticus} | 59.2105 | 78.0702 | MG089(687- |
| | | | | | | | 1374 of 2064) |
| | | | | | | | GB: U01722(1- |
| | | | | | | | 688 of 688) |
| MG090 | 116926 | 117549 | SP: P02358 | ribosomal protein S6 (rpS6) {Escherichia coli} | 23.8636 | 44.3182 | MG090(1- |
| | | | | | | | 176 of 624) |
| | | | | | | | GB: U02136(235- |
| | | | | | | | 410 of 410) |
| MG094 | 118847 | 120184 | SP: P03005 | replicative DNA helicase (dnaB) | 33.105 | 55.0228 | MG094(1068- |
| | | | | {Escherichia coli} | | | 731 of 1338) |
| | | | | | | | GB: U01803(1- |
| | | | | | | | 336 of 336) |
| MG094 | 118847 | 120184 | SP: P03005 | replicative DNA helicase (dnaB) | 33.105 | 55.0228 | MG094(228- |
| | | | | {Escherichia coli} | | | 1 of 1338) |
| | | | | | | | GB: U02158(1- |
| | | | | | | | 228 of 301) |
| MG095 | 120191 | 121384 | — | — | — | — | MG095(355- |
| | | | | | | | 759 of 1194) |
| | | | | | | | GB: U01787(1- |
| | | | | | | | 403 of 403) |
| MG096 | 121939 | 123519 | — | — | — | — | MG096(1- |
| | | | | | | | 309 of 1581) |
| | | | | | | | GB: U01713(58- |
| | | | | | | | 366 of 366) |
| MG096 | 121939 | 123519 | — | — | — | — | MG096(361- |
| | | | | | | | 531 of 1581) |
| | | | | | | | GB: U01762(1- |
| | | | | | | | 171 of 171) |
| MG097 | 123579 | 124313 | GB: D13169_3 | uracil DNA glycosylase (ung) | 32.5688 | 51.8349 | MG097(220- |
| | | | | {Escherichia coli} | | | 694 of 735) |
| | | | | | | | GB: U02201(1- |
| | | | | | | | 475 of 475) |
| MG098 | 124416 | 125846 | GP: M74170_2 | p48 eggshell protein (p48) {Schistosoma mansoni} | 23.0769 | 47.9853 | MG098(1260- |
| | | | | | | | 831 of 1431) |
| | | | | | | | GB: U01782(1- |
| | | | | | | | 431 of 431) |
| MG098 | 124416 | 125846 | GP: M74170_2 | p48 eggshell protein (p48) {Schistosoma mansoni} | 23.0769 | 47.9853 | MG098(134- |
| | | | | | | | 467 of 1431) |
| | | | | | | | GB: U01701(1- |
| | | | | | | | 334 of 334) |
| MG100 | 127278 | 128708 | GP: L22072_1 | PET112 protein {Saccharomyces cerevisiae} | 30.8696 | 54.1304 | MG100(533- |
| | | | | | | | 238 of 1431) |
| | | | | | | | GB: U01799(1- |
| | | | | | | | 296 of 296) |
| MG101 | 128686 | 129351 | — | — | — | — | MG101(89- |
| | | | | | | | 398 of 666) |
| | | | | | | | GB: U02103(1- |
| | | | | | | | 309 of 309) |
| MG102 | 129347 | 130291 | GB: J03762_1 | thioredoxin reductase (trxB) | 38.5906 | 59.396 | MG102(45- |
| | | | | {Escherichia coli} | | | 367 of 945) |
| | | | | | | | GB: U02197(1- |
| | | | | | | | 322 of 322) |
| MG103 | 130284 | 131123 | — | — | — | — | MG103(623- |
| | | | | | | | 256 of 840) |
| | | | | | | | GB: U02170(1- |
| | | | | | | | 368 of 369) |
| MG104 | 131384 | 133558 | GB: U14003_91 | virulence associated protein homolog (vacB) | 29.2335 | 52.2282 | MG104(215- |
| | | | | {Escherichia coli} | | | 491 of 2175) |
| | | | | | | | GB: U01795(1- |
| | | | | | | | 277 of 277) |
| MG108 | 135337 | 136116 | SP: P35182 | protein phosphatase 2C homolog (ptc1) | 27.5362 | 52.1739 | MG108(780- |
| | | | | {Saccharomyces cerevisiae} | | | 598 of 780) |
| | | | | | | | GB: U02111(33- |
| | | | | | | | 215 of 215) |
| MG109 | 136179 | 137264 | PIR: S36944 | protein serine/threonine kinase {Arabidopsis thaliana} | 33.7398 | 52.0325 | MG109(425- |
| | | | | | | | 786 of 1086) |
| | | | | | | | GB: U01720(1- |
| | | | | | | | 362 of 362) |
| MG109 | 136179 | 137264 | PIR: S36944 | protein serine/threonine kinase {Arabidopsis thaliana} | 33.7398 | 52.0325 | MG109(781- |
| | | | | | | | 1084 of 1086) |
| | | | | | | | GB: U01748(1- |
| | | | | | | | 303 of 303) |
| MG110 | 137380 | 138087 | GB: U14003_76 | hypothetical protein (GB: U14003_76) | 28.5714 | 54.1126 | MG110(140- |
| | | | | {Escherichia coli} | | | 242 of 708) |
| | | | | | | | GB: X61518(1- |
| | | | | | | | 102 of 102) |
| MG110 | 137380 | 138087 | GB: U14003_76 | hypothetical protein (GB: U14003_76) | 28.5714 | 54.1126 | MG110(670- |
| | | | | {Escherichia coli} | | | 378 of 708) |
| | | | | | | | GB: U01714(1- |
| | | | | | | | 293 of 293) |
| MG111 | 138105 | 139403 | SP: P13376 | phosphoglucose isomerase B (pgiB) | 34.8235 | 53.6471 | MG111(1- |
| | | | | {Bacillus stearothermophilus} | | | 98 of 1299) |
| | | | | | | | GB: U01747(38- |
| | | | | | | | 135 of 135) |
| MG112 | 139396 | 140022 | GB: M64173_3 | D-ribulose-5-phosphate 3 epimerase (cfxEc) | 33.1361 | 53.8462 | MG112(207- |
| | | | | {Alcaligenes eutrophus} | | | 473 of 627) |
| | | | | | | | GB: U02181(1- |
| | | | | | | | 267 of 267) |
| MG113 | 140039 | 141406 | GB: M33145_1 | asparaginyl-tRNA synthetase (asnS) {Escherichia coli} | 41.4579 | 64.2369 | MG113(1231- |
| | | | | | | | 941 of 1368) |
| | | | | | | | GB: U01692(1- |
| | | | | | | | 291 of 291) |
| MG115 | 142314 | 142550 | SP: P31131 | hypothetical protein (SP: P31131) {Escherichia coli} | 32.6087 | 50 | MG115(198- |
| | | | | | | | 237 of 237) |
| | | | | | | | GB: U02127(1- |
| | | | | | | | 40 of 234) |
| MG116 | 142562 | 143314 | — | — | — | — | MG116(1- |
| | | | | | | | 183 of 753) |
| | | | | | | | GB: U02127(52- |
| | | | | | | | 234 of 234) |
| MG119 | 144972 | 146663 | GB: M59444_2 | methylgalactoside permease ATP-binding protein (mglA) | 33.1984 | 57.6923 | MG119(1660- |
| | | | | {Escherichia coli} | | | 1692 of 1692) |
| | | | | | | | GB: U02147(1- |
| | | | | | | | 33 of 301) |
| MG119 | 144972 | 146663 | GB: M59444_2 | methylgalactoside permease ATP-binding protein (mglA) | 33.1984 | 57.6923 | MG119(192- |
| | | | | {Escherichia coli} | | | 1 of 1692) |
| | | | | | | | GB: U02149(1- |
| | | | | | | | 192 of 681) |
| MG120 | 146673 | 148232 | SP: P36948 | ribose transport system permease protein (rbsC) | 27.4809 | 51.9084 | MG120(1- |
| | | | | {Bacillus subtilis} | | | 259 of 1560) |
| | | | | | | | GB: U02147(43- |
| | | | | | | | 301 of 301) |
| MG122 | 149198 | 151324 | GB: L27797_2 | DNA topoisomerase I (topA) {Bacillus subtilis} | 38.9222 | 59.7305 | MG122(1193- |
| | | | | | | | 1443 of 2127) |
| | | | | | | | GB: U02134(1- |
| | | | | | | | 251 of 251) |
| MG122 | 149198 | 151324 | GB: L27797_2 | DNA topoisomerase I (topA) {Bacillus subtilis} | 38.9222 | 59.7305 | MG122(1578- |
| | | | | | | | 1971 of 2127) |
| | | | | | | | GB: U02242(1- |
| | | | | | | | 394 of 394) |
| MG123 | 151305 | 152717 | GB: M91593_1 | hypothetical protein (GB: M91593_1) | 23.9837 | 50.4065 | MG123(1413- |
| | | | | {Mycoplasma mycoides} | | | 1236 of 1413) |
| | | | | | | | GB: U01796(114- |
| | | | | | | | 291 of 291) |
| MG124 | 152767 | 153072 | GB: J03294_1 | thioredoxin (trx) {Bacillus subtilis} | 36.0825 | 65.9794 | MG124(64- |
| | | | | | | | 1 of 306) |
| | | | | | | | GB: U01796(1- |
| | | | | | | | 64 of 291) |
| MG133 | 159669 | 158986 | — | — | — | — | MG133(1- |
| | | | | | | | 110 of 684) |
| | | | | | | | GB: U02144(237- |
| | | | | | | | 345 of 345) |
| MG133 | 159669 | 158986 | — | — | — | — | MG133(435- |
| | | | | | | | 673 of 684) |
| | | | | | | | GB: X61537(1- |
| | | | | | | | 238 of 238) |
| MG134 | 159797 | 160096 | GB: M38777_3 | hypothetical protein (GB: M38777_3) | 28.5714 | 57.1429 | MG134(109- |
| | | | | {Escherichia coli} | | | 1 of 300) |
| | | | | | | | GB: U02144(1- |
| | | | | | | | 109 of 345) |
| MG135 | 160913 | 160074 | PIR: E22845 | hypothetical protein 4 (GP: Z33006_1) | 30.7692 | 55.9441 | MG135(485- |
| | | | | {Trypanosoma brucei} | | | 782 of 840) |
| | | | | | | | GB: U02114(1- |
| | | | | | | | 298 of 298) |
| MG138 | 163590 | 165383 | GB: K00426_1 | GTP-binding membrane protein (lepA) | 47.5465 | 70.5584 | MG138(1237- |
| | | | | {Escherichia coli} | | | 938 of 1794) |
| | | | | | | | GB: U02133(2- |
| | | | | | | | 301 of 301) |
| MG138 | 163590 | 165383 | GB: K00426_1 | GTP-binding membrane protein (lepA) | 47.5465 | 70.5584 | MG138(1318- |
| | | | | {Escherichia coli} | | | 1794 of 1794) |
| | | | | | | | GB: U01745(1- |
| | | | | | | | 477 of 524) |
| MG138 | 163590 | 165383 | GB: K00426_1 | GTP-binding membrane protein (lepA) | 47.5465 | 70.5584 | MG138(323- |
| | | | | {Escherichia coli} | | | 591 of 1794) |
| | | | | | | | GB: X61521(1- |
| | | | | | | | 269 of 269) |
| MG140 | 175807 | 179145 | — | — | — | — | MG140(1- |
| | | | | | | | 41 of 3339) |
| | | | | | | | GB: U02110(178- |
| | | | | | | | 218 of 218) |
| MG140 | 175807 | 179145 | — | — | — | — | MG140(2727- |
| | | | | | | | 2429 of 3339) |
| | | | | | | | GB: U01730(1- |
| | | | | | | | 297 of 297) |
| MG140 | 175807 | 179145 | — | — | — | — | MG140(3302- |
| | | | | | | | 2994 of 3339) |
| | | | | | | | GB: U02156(1- |
| | | | | | | | 308 of 308) |
| MG140 | 175807 | 179145 | — | — | — | — | MG140(382- |
| | | | | | | | 834 of 3339) |
| | | | | | | | GB: U01729(1- |
| | | | | | | | 454 of 454) |
| MG140 | 175807 | 179145 | — | — | — | — | MG140(834- |
| | | | | | | | 616 of 3339) |
| | | | | | | | GB: X61512(1- |
| | | | | | | | 220 of 220) |
| MG140 | 175807 | 179145 | — | — | — | — | MG140(880- |
| | | | | | | | 1182 of 3339) |
| | | | | | | | GB: U01742(1- |
| | | | | | | | 303 of 303) |
| MG141 | 179153 | 180745 | SP: P32727 | N-utilization substance protein A homolog (nusA) | 30.8743 | 53.8251 | MG141(223- |
| | | | | {Bacillus subtilis} | | | 871 of 1593) |
| | | | | | | | GB: U01778(1- |
| | | | | | | | 652 of 652) |
| MG142 | 181007 | 182863 | GB: M34836_1 | protein synthesis initiation factor 2 (infB) | 46.0292 | 64.6677 | MG142(265- |
| | | | | {Bacillus subtilis} | | | 393 of 1857) |
| | | | | | | | GB: U01765(1- |
| | | | | | | | 129 of 129) |
| MG144 | 183216 | 184052 | — | — | — | — | MG144(190- |
| | | | | | | | 420 of 837) |
| | | | | | | | GB: U02121(1- |
| | | | | | | | 231 of 231) |
| MG146 | 184877 | 186148 | GB: X73141_2 | hemolysin (tlyC) {Serpulina hyodysenteriae} | 26.2712 | 52.1186 | MG146(1272- |
| | | | | | | | 1174 of 1272) |
| | | | | | | | GB: U02223(19- |
| | | | | | | | 117 of 117) |
| MG149 | 188609 | 189451 | — | — | — | — | MG149(843- |
| | | | | | | | 765 of 843) |
| | | | | | | | GB: U02135(182- |
| | | | | | | | 260 of 260) |
| MG151 | 190372 | 191142 | SP: P10134 | ribosomal protein L3 (rpL3) {Mycoplasma capricolum} | 42.5926 | 61.5741 | MG151(528- |
| | | | | | | | 1 of 771) |
| | | | | | | | GB: U02153(1- |
| | | | | | | | 527 of 543) |
| MG168 | 198519 | 199151 | GB: M57621_1 | ribosomal protein S5 (rpS5) | 55.9748 | 72.327 | MG168(505- |
| | | | | {Bacillus stearothermophilus} | | | 633 of 633) |
| | | | | | | | GB: U01726(1- |
| | | | | | | | 129 of 260) |
| MG175 | 202762 | 203133 | GB: M26414_3 | ribosomal protein S13 (rpS13) {Bacillus subtilis} | 63.3333 | 82.5 | MG175(22- |
| | | | | | | | 372 of 372) |
| | | | | | | | GB: U01733(1- |
| | | | | | | | 351 of 600) |
| MG176 | 203136 | 203528 | GB: X02543_2 | ribosomal protein S11 (rpS11) {Escherichia coli} | 47.7876 | 69.9115 | MG176(1- |
| | | | | | | | 247 of 393) |
| | | | | | | | GB: U01733(354- |
| | | | | | | | 600 of 600) |
| MG180 | 205682 | 206593 | GB: M61017_1 | membrane transport protein (glnQ) | 37.3832 | 63.0841 | MG180(249- |
| | | | | {Bacillus stearothermophilus} | | | 1 of 912) |
| | | | | | | | GB: U01754(1- |
| | | | | | | | 248 of 265) |
| MG180 | 205682 | 206593 | GB: M61017_1 | membrane transport protein (glnQ) | 37.3832 | 63.0841 | MG180(912- |
| | | | | {Bacillus stearothermophilus} | | | 784 of 912) |
| | | | | | | | GB: U01750(167- |
| | | | | | | | 295 of 295) |
| MG181 | 206589 | 207848 | — | — | — | — | MG181(171- |
| | | | | | | | 1 of 1260) |
| | | | | | | | GB: U01750(1- |
| | | | | | | | 171 of 295) |
| MG182 | 207844 | 208575 | SP: P07649 | pseudouridylate synthase I (hisT) {Escherichia coli} | 27.0042 | 45.1477 | MG182(1- |
| | | | | | | | 308 of 732) |
| | | | | | | | GB: U02176(70- |
| | | | | | | | 377 of 377) |
| MG182 | 207844 | 208575 | SP: P07649 | pseudouridylate synthase I (hisT) {Escherichia coli} | 27.0042 | 45.1477 | MG182(732- |
| | | | | | | | 383 of 732) |
| | | | | | | | GB: U02100(31- |
| | | | | | | | 380 of 380) |
| MG183 | 208568 | 210388 | GB: Z32522_1 | oligoendopeptidase F (pepF) {Lactococcus lactis} | 30 | 50.6667 | MG183(27- |
| | | | | | | | 335 of 1821) |
| | | | | | | | GB: U02198(1- |
| | | | | | | | 309 of 309) |
| MG183 | 208568 | 210388 | GB: Z32522_1 | oligoendopeptidase F (pepF) {Lactococcus lactis} | 30 | 50.6667 | MG183(38- |
| | | | | | | | 1 of 1821) |
| | | | | | | | GB: U02100(1- |
| | | | | | | | 38 of 380) |
| MG184 | 210392 | 211342 | GB: M97479_2 | methyltransferase (ssoIM) {Shigella sonnei} | 42.5249 | 67.4419 | MG184(520- |
| | | | | | | | 719 of 951) |
| | | | | | | | GB: U02115(1- |
| | | | | | | | 200 of 201) |
| MG190 | 220479 | 221561 | PIR.JS0068 | 29 kDa protein, MgPa operon (mgp) | 62.0833 | 82.0833 | MG190(28- |
| | | | | {Mycoplasma genitalium} | | | 1083 of 1083) |
| | | | | | | | GB: M31431(1- |
| | | | | | | | 1056 of 8760) |
| MG194 | 232007 | 233029 | GB: V00291_5 | phenylalanyl-tRNA synthetase beta-subunit (pheS) | 35.0769 | 56.3077 | MG194(194- |
| | | | | {Escherichia coli} | | | 359 of 1023) |
| | | | | | | | GB: U02120(1- |
| | | | | | | | 166 of 166) |
| MG195 | 233036 | 235453 | SP: P17922 | phenylalanyl-tRNA synthetase beta chain (pheT) | 25.4597 | 49.0806 | MG195(2044- |
| | | | | {Bacillus subtilis} | | | 2396 of 2418) |
| | | | | | | | GB: U02173(1- |
| | | | | | | | 353 of 353) |
| MG200 | 237346 | 239148 | GB: L36455_1 | heat shock protein (dnaJ) {Coxiella burnetii} | 33.5938 | 51.5625 | MG200(842- |
| | | | | | | | 1227 of 1803) |
| | | | | | | | GB: U02163(2- |
| | | | | | | | 387 of 387) |
| MG203 | 240322 | 242220 | GB: U25549_1 | topoisomerase IV subunit B (parE) | 100 | 100 | MG203(1216- |
| | | | | {Mycoplasma genitalium} | | | 1899 of 1899) |
| | | | | | | | GB U25549(1- |
| | | | | | | | 684 of 2124) |
| MG204 | 242223 | 244565 | GB: U25549_2 | topoisomerase IV subunit A (parC) | 99.7912 | 99.7912 | MG204(1- |
| | | | | {Mycoplasma genitalium} | | | 1438 of 2343) |
| | | | | | | | GB: U25549(687- |
| | | | | | | | 2124 of 2124) |
| MG204 | 242223 | 244565 | GB: U25549_2 | topoisomerase IV subunit A (parC) | 99.7912 | 99.7912 | MG204(1950- |
| | | | | {Mycoplasma genitalium} | | | 1641 of 2343) |
| | | | | | | | GB: U02155(1- |
| | | | | | | | 308 of 308) |
| MG206 | 246127 | 247422 | SP: P14951 | excinuclease ABC subunit C (uvrC) | 28.0872 | 51.0896 | MG206(738- |
| | | | | | | | 399 of 1296) |
| | | | | | | | GB: U02182(1- |
| | | | | | | | 341 of 341) |
| MG208 | 248492 | 247905 | — | — | — | — | MG208(585- |
| | | | | | | | 162 of 588) |
| | | | | | | | GB: U01785(1- |
| | | | | | | | 423 of 423) |
| MG209 | 249402 | 248479 | SP: P23851 | hypothetical protein (SP: P23851) {Escherichia coli} | 30.4498 | 55.0173 | MG209(730- |
| | | | | | | | 372 of 924) |
| | | | | | | | GB: U02214(1- |
| | | | | | | | 359 of 359) |
| MG210 | 249947 | 249405 | GB: M83994_1 | prolipoprotein signal peptidase (lsp) | 32.3944 | 52.1127 | MG210(1- |
| | | | | {Staphylococcus aureus} | | | 116 of 543) |
| | | | | | | | GB: U01759(196- |
| | | | | | | | 311 of 311) |
| MG212 | 251780 | 252583 | GB: L32861_1 | 1-acyl-sn-glycerol-3-phosphate acetyltransferase (plsC) | 32.1429 | 60.7143 | MG212(7- |
| | | | | {Borrelia burgdorferi} | | | 315 of 804) |
| | | | | | | | GB: U02160(5- |
| | | | | | | | 313 of 313) |
| MG216 | 255594 | 257117 | GB: L07920_2 | pyruvate kinase (pyk) {Lactococcus lactis} | 35.3319 | 57.6017 | MG216(1118- |
| | | | | | | | 790 of 1524) |
| | | | | | | | GB: U01798(1- |
| | | | | | | | 329 of 329) |
| MG218 | 259176 | 264590 | PIR: S37536 | no score generated -score shown is bogus | −1 | −1 | MG218(1669- |
| | | | | | | | 1977 of 5415) |
| | | | | | | | GB: U02165(1- |
| | | | | | | | 309 of 309) |
| MG221 | 266626 | 267087 | SP: P22186 | hypothetical protein (SP: P22186) {Escherichia coli} | 28.8732 | 56.338 | MG221(337- |
| | | | | | | | 49 of 462) |
| | | | | | | | GB: U02195(1- |
| | | | | | | | 290 of 290) |
| MG225 | 270404 | 271870 | GB: U14003_71 | hypothetical protein (GB: U14003_71) | 21.9565 | 48.0435 | MG225(1467- |
| | | | | {Escherichia coli} | | | 1409 of 1467) |
| | | | | | | | GB: U02264(289- |
| | | | | | | | 347 of 347) |
| MG226 | 271938 | 273314 | GB: D26562_11 | aromatic amino acid transport protein (aroP) | 24.5902 | 47.2131 | MG226(221- |
| | | | | {Escherichia coli} | | | 1 of 1377) |
| | | | | | | | GB: U02264(1- |
| | | | | | | | 221 of 347) |
| MG227 | 273789 | 274649 | SP: P13954 | thymidylate synthase (thyA) {Staphylococcus aureus} | 56.5972 | 75.3472 | MG227(577- |
| | | | | | | | 861 of 861) |
| | | | | | | | GB: U01718(1- |
| | | | | | | | 285 of 439) |
| MG228 | 274652 | 275131 | GB: X60681_1 | dihydrofolate reductase (dhfr) {Lactococcus lactis} | 33.1288 | 59.5092 | MG228(480- |
| | | | | | | | 385 of 480) |
| | | | | | | | GB: U02137(174- |
| | | | | | | | 269 of 269) |
| MG229 | 275140 | 276159 | SP: P17424 | ribonucleotide reductase 2 (nrdF) | 50 | 70.0637 | MG229(1020- |
| | | | | {Salmonella typhimurium} | | | 697 of 1020) |
| | | | | | | | GB: U01739(22- |
| | | | | | | | 344 of 344) |
| MG231 | 276646 | 278808 | GB: X73226_1 | ribonucleoside-diphosphate reductase (nrdE) | 54.1193 | 73.1534 | MG231(2122- |
| | | | | {Salmonella typhimurium} | | | 2163 of 2163) |
| | | | | | | | GB: U02141(1- |
| | | | | | | | 42 of 827) |
| MG237 | 281078 | 281959 | — | — | — | — | MG237(647- |
| | | | | | | | 882 of 882) |
| | | | | | | | GB: U01774(1- |
| | | | | | | | 236 of 289) |
| MG238 | 281992 | 283323 | GB: M34066_1 | trigger factor (tig) {Escherichia coli} | 24.6193 | 47.9695 | MG238(420- |
| | | | | | | | 648 of 1332) |
| | | | | | | | GB: U01772(1- |
| | | | | | | | 229 of 229) |
| MG239 | 283395 | 285779 | SP: P37945 | ATP-dependent protease (Ion) {Bacillus subtilis} | 43.6268 | 65.8344 | MG239(1818- |
| | | | | | | | 1449 of 2385) |
| | | | | | | | GB: U02148(1- |
| | | | | | | | 370 of 370) |
| MG240 | 286657 | 285782 | GB: M91593_1 | hypothetical protein (GB: M91593_1) | 27.8195 | 53.3835 | MG240(876- |
| | | | | {Mycoplasma mycoides} | | | 598 of 876) |
| | | | | | | | GB.U01734(27- |
| | | | | | | | 305 of 305) |
| MG242 | 288752 | 290641 | — | — | — | — | MG242(886- |
| | | | | | | | 543 of 1890) |
| | | | | | | | GB: U02194(1- |
| | | | | | | | 344 of 344) |
| MG244 | 291332 | 293440 | GB: M99049_1 | DNA helicase II (mutB1) {Haemophilus influenzae} | 36.0078 | 55.9687 | MG244(829- |
| | | | | | | | 1035 of 2109) |
| | | | | | | | GB: X61517(1- |
| | | | | | | | 207 of 207) |
| MG249 | 297604 | 296114 | SP: P33656 | RNA polymerase sigma-A factor (sigA) | 43.6842 | 66.0526 | MG249(970- |
| | | | | {Clostridium acetobutylicum} | | | 666 of 1491) |
| | | | | | | | GB: X61535(1- |
| | | | | | | | 306 of 306) |
| MG250 | 299472 | 297652 | GB: M10040_1 | DNA primase (dnaE) {Bacillus subtilis} | 27.2727 | 52.2078 | MG250(1530- |
| | | | | | | | 1821 of 1821) |
| | | | | | | | GB: U01771(1- |
| | | | | | | | 292 of 572) |
| MG250 | 299472 | 297652 | GB: M10040_1 | DNA primase (dnaE) {Bacillus subtilis} | 27.2727 | 52.2078 | MG250(648- |
| | | | | | | | 231 of 1821) |
| | | | | | | | GB: U02146(1- |
| | | | | | | | 418 of 418) |
| MG254 | 304823 | 302847 | GB: M24278_1 | DNA ligase (lig) {Escherichia coli} | 38.2263 | 59.3272 | MG254(1429- |
| | | | | | | | 1722 of 1977) |
| | | | | | | | GB: U02152(1- |
| | | | | | | | 294 of 294) |
| MG254 | 304823 | 302847 | GB: M24278_1 | DNA ligase (lig) {Escherichia coli} | 38.2263 | 59.3272 | MG254(37- |
| | | | | | | | 367 of 1977) |
| | | | | | | | GB: U01761(1- |
| | | | | | | | 330 of 330) |
| MG255 | 304999 | 306093 | — | — | — | — | MG255(726- |
| | | | | | | | 1095 of 1095) |
| | | | | | | | GB: U02164(1- |
| | | | | | | | 370 of 370) |
| MG255 | 304999 | 306093 | — | — | — | — | MG255(729- |
| | | | | | | | 400 of 1095) |
| | | | | | | | GB: U02174(1- |
| | | | | | | | 333 of 333) |
| MG261 | 315699 | 318320 | GB: M19334_4 | DNA polymerase III alpha subunit (dnaE) | 31.9115 | 55.7662 | MG261(2442- |
| | | | | {Escherichia coli} | | | 2159 of 2622) |
| | | | | | | | GB: U01738(1- |
| | | | | | | | 284 of 284) |
| MG263 | 320175 | 321047 | GB: L10328_61 | hypothetical protein (GB: L10328_61) | 27.8008 | 47.7178 | MG263(828- |
| | | | | {Escherichia coli} | | | 489 of 873) |
| | | | | | | | GB: U01764(1- |
| | | | | | | | 340 of 340) |
| MG266 | 324809 | 322434 | GB: M88581_1 | leucyl-tRNA synthetase (leuS) | 43.401 | 64.2132 | MG266(78- |
| | | | | {Bacillus stearothermophilus} | | | 287 of 2376) |
| | | | | | | | GB: U01780(1- |
| | | | | | | | 210 of 210) |
| MG266 | 324809 | 322434 | GB: M88581_1 | leucyl-tRNA synthetase (leuS) | 43.401 | 64.2132 | MG266(957- |
| | | | | {Bacillus stearothermophilus} | | | 622 of 2376) |
| | | | | | | | GB: U02167(1- |
| | | | | | | | 336 of 336) |
| MG269 | 327050 | 326031 | GB: D90354_1 | surface protein antigen precursor (pag) | 25.5144 | 47.3251 | MG269(239- |
| | | | | {Streptococcus sobrinus} | | | 1 of 1020) |
| | | | | | | | GB: U02215(1- |
| | | | | | | | 239 of 366) |
| MG271 | 329826 | 328456 | SP: P11959 | Dihydrolipoamide dehydrogenase (pdhD) | 38.3592 | 62.306 | MG271(914- |
| | | | | {Bacillus stearothermophilus} | | | 1214 of 1371) |
| | | | | | | | GB: U01784(1- |
| | | | | | | | 301 of 301) |
| MG275 | 334772 | 333339 | SP: P37061 | NADH oxidase (nox) {Enterococcus faecalis} | 39.229 | 62.1315 | MG275(81- |
| | | | | | | | 1 of 1434) |
| | | | | | | | GB: U01786(4- |
| | | | | | | | 84 of 280) |
| MG276 | 335397 | 334858 | GB: M14040_1 | Adenine phosphoribosyltransferase (apt) | 34.3373 | 58.4337 | MG276(540- |
| | | | | {Escherichia coli} | | | 430 of 540) |
| | | | | | | | GB: U01786(170- |
| | | | | | | | 280 of 280) |
| MG278 | 338366 | 340525 | GB: X72832_5 | stringent response-like protein (rel) | 29.1339 | 55.1181 | MG278(391- |
| | | | | {Streptococcus equisimilis} | | | 697 of 2160) |
| | | | | | | | GB: U01770(1- |
| | | | | | | | 308 of 308) |
| MG281 | 343702 | 342035 | — | — | — | — | MG281(748- |
| | | | | | | | 1051 of 1668) |
| | | | | | | | GB: U01706(1- |
| | | | | | | | 303 of 303) |
| MG282 | 344849 | 344367 | SP: P2740 | transcription elongation factor (greA) | 40.146 | 65.6934 | MG282(483- |
| | | | | {Rickettsia prowazekii} | | | 356 of 483) |
| | | | | | | | GB: U02104(187- |
| | | | | | | | 314 of 314) |
| MG283 | 345181 | 346629 | GB: M97858_1 | prolyl-tRNA synthetase (proS) {Escherichia coli} | 22.6562 | 46.0938 | MG283(839- |
| | | | | | | | 1183 of 1449) |
| | | | | | | | GB: U02205(1- |
| | | | | | | | 346 of 346) |
| MG285 | 347214 | 348254 | — | — | — | — | MG285(315- |
| | | | | | | | 493 of 1041) |
| | | | | | | | GB: U02266(1- |
| | | | | | | | 180 of 180) |
| MG289 | 354023 | 355126 | SP: P15363 | high affinity transport system protein P37 (P37) | 35.7798 | 58.4098 | MG289(105- |
| | | | | {Mycoplasma hyorhinis} | | | 1 of 1104) |
| | | | | | | | GB: U02132(1- |
| | | | | | | | 105 of 571) |
| MG291 | 355846 | 357474 | SP: P15362 | transport system permease protein P69 (P69) | 27.9159 | 54.8757 | MG291(1216- |
| | | | | {Mycoplasma hyorhinis} | | | 1629 of 1629) |
| | | | | | | | GB: U01768(1- |
| | | | | | | | 415 of 705) |
| MG291 | 355846 | 357474 | SP: P15362 | transport system permease protein P69 (P69) | 27.9159 | 54.8757 | MG291(279- |
| | | | | {Mycoplasma hyorhinis} | | | 1 of 1629) |
| | | | | | | | GB: U02171(1- |
| | | | | | | | 279 of 346) |
| MG293 | 361384 | 360653 | SP: P37965 | Glycerophosphoryl diester phosphodiesterase (glpQ) | 30.3965 | 55.9471 | MG293(357- |
| | | | | {Bacillus subtilis} | | | 41 of 732) |
| | | | | | | | GB: U02118(1- |
| | | | | | | | 317 of 317) |
| MG294 | 362801 | 361380 | GB: L19201_18 | hypothetical protein (GB: L19201_18) | 23.1013 | 46.2025 | MG294(256- |
| | | | | {Escherichia coli} | | | 592 of 1422) |
| | | | | | | | GB: U02243(1- |
| | | | | | | | 337 of 337) |
| MG297 | 365574 | 364537 | GB: U00039_18 | cell division protein (ftsY) {Escherichia coli} | 36.1371 | 57.9439 | MG297(1- |
| | | | | | | | 57 of 1038) |
| | | | | | | | GB: U02177(215- |
| | | | | | | | 271 of 271) |
| MG298 | 368529 | 365584 | GB: M34956_1 | 115 kDa protein (p115) {Mycoplasma hyorhinis} | 33.4059 | 57.5626 | MG298(2743- |
| | | | | | | | 2946 of 2946) |
| | | | | | | | GB: U02177(1- |
| | | | | | | | 205 of 271) |
| MG300 | 370962 | 369715 | SP: P36204 | phosphoglycerate kinase (pgk) {Thermotoga maritima} | 51.2887 | 70.6186 | MG300(1- |
| | | | | | | | 167 of 1248) |
| | | | | | | | GB: U02178(167- |
| | | | | | | | 333 of 333) |
| MG300 | 370962 | 369715 | SP: P36204 | phosphoglycerate kinase (pgk) {Thermotoga maritima} | 51.2887 | 70.6186 | MG300(935- |
| | | | | | | | 609 of 1248) |
| | | | | | | | GB: U02226(1- |
| | | | | | | | 326 of 326) |
| MG300 | 370962 | 369715 | SP: P36204 | phosphoglycerate kinase (pgk) {Thermotoga maritima} | 51.2887 | 70.6186 | MG300(939- |
| | | | | | | | 1243 of 1248) |
| | | | | | | | GB: U02234(1- |
| | | | | | | | 305 of 305) |
| MG301 | 371962 | 370952 | GB: X72219_1 | glyceraldehyde-3-phosphate dehydrogenase (gap) | 56.0606 | 73.0303 | MG301(244- |
| | | | | {Clostridium pasteurianum} | | | 1 of 1011) |
| | | | | | | | GB: U02213(1- |
| | | | | | | | 244 of 364) |
| MG301 | 371962 | 370952 | GB: X72219_1 | glyceraldehyde-3-phosphate dehydrogenase (gap) | 56.0606 | 73.0303 | MG301(835- |
| | | | | {Clostridium pasteurianum} | | | 1011 of 1011) |
| | | | | | | | GB: U02178(1- |
| | | | | | | | 177 of 333) |
| MG302 | 372946 | 371996 | — | — | — | — | MG302(951- |
| | | | | | | | 865 of 951) |
| | | | | | | | GB: U02213(278- |
| | | | | | | | 364 of 364) |
| MG305 | 376705 | 374921 | GB: D30690_3 | heat shock protein 70 (hsp70) {Staphylococcus aureus} | 57.4359 | 75.8974 | MG305(1382- |
| | | | | | | | 1055 of 1785) |
| | | | | | | | GB: U02204(1- |
| | | | | | | | 327 of 327) |
| MG307 | 381507 | 377977 | — | — | — | — | MG307(3175- |
| | | | | | | | 2042 of 3531) |
| | | | | | | | GB: U01767(1- |
| | | | | | | | 1134 of 1134) |
| MG308 | 382724 | 381495 | SP: P23304 | ATP-dependent RNA helicase (deaD) {Escherichia coli} | 23.0986 | 48.169 | MG308(1- |
| | | | | | | | 89 of 1230) |
| | | | | | | | GB: U02200(276- |
| | | | | | | | 364 of 364) |
| MG309 | 386408 | 382734 | — | — | — | — | MG309(3410- |
| | | | | | | | 3675 of 3675) |
| | | | | | | | GB: U02200(1- |
| | | | | | | | 266 of 364) |
| MG312 | 391334 | 387918 | GB: U11381_1 | cytadherence-accessory protein (hmwl) | 39.3235 | 60.6765 | MG312(2541- |
| | | | | {Mycoplasma pneumoniae} | | | 2160 of 3417) |
| | | | | | | | GB: U02261(1- |
| | | | | | | | 382 of 382) |
| MG314 | 393633 | 392305 | GP: L38997_4 | hypothetical protein (GP: L38997_4) | 51.4477 | 71.4922 | MG314(514- |
| | | | | {Mycoplasma pneurnoniae} | | | 206 of 1329) |
| | | | | | | | GB: U02151(1- |
| | | | | | | | 309 of 309) |
| MG317 | 397423 | 395627 | GB: M82965_1 | cytadherence-accessory protein (hmw3) | 41.1458 | 59.8958 | MG317(1329- |
| | | | | {Mycoplasma pneumoniae} | | | 1542 of 1797) |
| | | | | | | | GB: U02267(1- |
| | | | | | | | 214 of 214) |
| MG317 | 397423 | 395627 | GB: M82965_1 | cytadherence-accessory protein (hmw3) | 41.1458 | 59.8958 | MG317(509- |
| | | | | {Mycoplasma pneumoniae} | | | 169 of 1797) |
| | | | | | | | GB: U02224(1- |
| | | | | | | | 341 of 341) |
| MG317 | 397423 | 395627 | GB: M82965_1 | cytadherence-accessory protein (hmw3) | 41.1458 | 59.8958 | MG317(73- |
| | | | | {Mycoplasma pneumoniae} | | | 1 of 1797) |
| | | | | | | | GB: U01716(1- |
| | | | | | | | 73 of 325) |
| MG318 | 398280 | 397441 | GB: J04151_1 | fibronectin-binding protein (fnbA) | 24.6154 | 43.0769 | MG318(840- |
| | | | | {Staphylococcus aureus} | | | 604 of 840) |
| | | | | | | | GB: U01716(91- |
| | | | | | | | 325 of 325) |
| MG319 | 398833 | 398300 | — | — | — | — | MG319(423- |
| | | | | | | | 1 of 534) |
| | | | | | | | GB: U01769(1- |
| | | | | | | | 426 of 541) |
| MG320 | 399797 | 398940 | — | — | — | — | MG320(371- |
| | | | | | | | 781 of 858) |
| | | | | | | | GB: U01700(1- |
| | | | | | | | 410 of 410) |
| MG324 | 408792 | 407731 | GB: D00398_1 | aminopeptidase P (pepP) {Escherichia coli} | 30.531 | 54.4248 | MG324(883- |
| | | | | | | | 1062 of 1062) |
| | | | | | | | GB: U01717(1- |
| | | | | | | | 181 of 223) |
| MG324 | 408792 | 407731 | GB: D00398_1 | aminopeptidase P (pepP) {Escherichia coli} | 30.531 | 54.4248 | MG324(889- |
| | | | | | | | 1062 of 1062) |
| | | | | | | | GB: U01755(2- |
| | | | | | | | 175 of 217) |
| MG327 | 410676 | 409873 | SP: P26174 | magnesium-chelatase 30 kDa subunit (bchO) | 26.7281 | 51.1521 | MG327(782- |
| | | | | {Rhodobacter capsulatus} | | | 533 of 804) |
| | | | | | | | GB: U02232(1- |
| | | | | | | | 250 of 250) |
| MG328 | 412933 | 410666 | GB: X62467_1 | protein V (fcrV) {Streptococcus sp.} | 27.5434 | 48.3871 | MG328(339- |
| | | | | | | | 53 of 2268) |
| | | | | | | | GB: U02188(1- |
| | | | | | | | 287 of 287) |
| MG328 | 412933 | 410666 | GB: X62467_1 | protein V (fcrV) {Streptococcus sp.} | 27.5434 | 48.3871 | MG328(817- |
| | | | | | | | 462 of 2268) |
| | | | | | | | GB: U02203(1- |
| | | | | | | | 356 of 356) |
| MG330 | 414975 | 414325 | SP: P38493 | cytidylate kinase (cmk) {Bacillus subtilis} | 40.3756 | 61.0329 | MG330(537- |
| | | | | | | | 226 of 651) |
| | | | | | | | GB: U02241(1- |
| | | | | | | | 312 of314) |
| MG334 | 419480 | 416970 | SP: Q05873 | valyl-tRNA synthetase (valS) {Bacillus subtilis} | 38.5629 | 60.5988 | MG334(1109- |
| | | | | | | | 781 of 2511) |
| | | | | | | | GB: U02202(1- |
| | | | | | | | 330 of 330) |
| MG334 | 419480 | 416970 | SP: Q05873 | valyl-tRNA synthetase (valS) {Bacillus subtilis} | 38.5629 | 60.5988 | MG334(2400- |
| | | | | | | | 2511 of 2511) |
| | | | | | | | GB: U02249(1- |
| | | | | | | | 112 of 305) |
| MG335 | 420045 | 419473 | SP: P38424 | hypothetical protein (SP: P38424) {Bacillus subtilis} | 34.5238 | 61.3095 | MG335(1- |
| | | | | | | | 95 of 573) |
| | | | | | | | GB: U02190(200- |
| | | | | | | | 294 of 294) |
| MG336 | 421467 | 422690 | GB: U00013_6 | nitrogen fixation protein (nifS) {Mycobacterium leprae} | 26.2295 | 47.2678 | MG336(990- |
| | | | | | | | 719 of 1224) |
| | | | | | | | GB: U02256(1- |
| | | | | | | | 272 of 272) |
| MG337 | 422697 | 423110 | — | — | — | — | MG337(414- |
| | | | | | | | 151 of 414) |
| | | | | | | | GB: U01709(35- |
| | | | | | | | 297 of 297) |
| MG338 | 426915 | 423103 | — | — | — | — | MG338(1- |
| | | | | | | | 251 of 3813) |
| | | | | | | | GB: U02269(65- |
| | | | | | | | 315 of 315) |
| MG338 | 426915 | 423103 | — | — | — | — | MG338(1304- |
| | | | | | | | 917 of 3813) |
| | | | | | | | GB: U02221(1- |
| | | | | | | | 388 of 388) |
| MG338 | 426915 | 423103 | — | — | — | — | MG338(3342- |
| | | | | | | | 3067 of 3813) |
| | | | | | | | GB: U01809(1- |
| | | | | | | | 276 of 276) |
| MG338 | 426915 | 423103 | — | — | — | — | MG338(3772- |
| | | | | | | | 3813 of 3813) |
| | | | | | | | GB: U01709(1- |
| | | | | | | | 42 of 297) |
| MG339 | 428115 | 427096 | GB: L25893_1 | recombination protein (recA) {Staphylococcus aureus} | 46.5986 | 69.3878 | MG339(372- |
| | | | | | | | 93 of 1020) |
| | | | | | | | GB: U01704(1- |
| | | | | | | | 279 of 279) |
| MG340 | 434458 | 430583 | SP: P00577 | DNA-directed RNA polymerase beta′chain (rpoC) | 44.4828 | 66.0345 | MG340(1294- |
| | | | | {Escherichia coli} | | | 999 of 3876) |
| | | | | | | | GB: X61534(1- |
| | | | | | | | 295 of 295) |
| MG340 | 434458 | 430583 | SP: P00577 | DNA-directed RNA polymerase beta′chain (rpoC) | 44.4828 | 66.0345 | MG340(1519- |
| | | | | {Escherichia coli} | | | 1289 of 3876) |
| | | | | | | | GB: X61528(1- |
| | | | | | | | 231 of 231) |
| MG340 | 434458 | 430583 | SP: P00577 | DNA-directed RNA polymerase beta′chain (rpoC) | 44.4828 | 66.0345 | MG340(3444- |
| | | | | {Escherichia coli} | | | 3083 of 3876) |
| | | | | | | | GB: U02169(1- |
| | | | | | | | 361 of 361) |
| MG340 | 434458 | 430583 | SP: P00577 | DNA-directed RNA polymerase beta′chain (rpoC) | 44.4828 | 66.0345 | MG340(3772- |
| | | | | {Escherichia coli} | | | 3876 of 3876) |
| | | | | | | | GB: U01766(1- |
| | | | | | | | 105 of 467) |
| MG340 | 434458 | 430583 | SP: P00577 | DNA-directed RNA polymerase beta′chain (rpoC) | 44.4828 | 66.0345 | MG340(426- |
| | | | | {Escherichia coli} | | | 66 of 3876) |
| | | | | | | | GB: U01797(1- |
| | | | | | | | 361 of 361) |
| MG341 | 438640 | 434471 | GB: L24376_3 | RNA polymerase beta subunit (rpoB) {Bacillus subtilis} | 46.5338 | 67.5043 | MG341(1- |
| | | | | | | | 107 of 4170) |
| | | | | | | | GB: U02230(217- |
| | | | | | | | 323 of 323) |
| MG341 | 438640 | 434471 | GB: L24376_3 | RNA polymerase beta subunit (rpoB) {Bacillus subtilis} | 46.5338 | 67.5043 | MG341(1932- |
| | | | | | | | 1595 of 4170) |
| | | | | | | | GB: U01737(1- |
| | | | | | | | 338 of 338) |
| MG341 | 438640 | 434471 | GB: L24376_3 | RNA polymerase beta subunit (rpoB) {Bacillus subtilis} | 46.5338 | 67.5043 | MG341(2833- |
| | | | | | | | 3201 of 4170) |
| | | | | | | | GB: U01735(1- |
| | | | | | | | 369 of 369) |
| MG342 | 439236 | 438733 | — | — | — | — | MG342(381- |
| | | | | | | | 504 of 504) |
| | | | | | | | GB: U02230(1- |
| | | | | | | | 124 of 323) |
| MG342 | 439236 | 438733 | — | — | — | — | MG342(386- |
| | | | | | | | 65 of 504) |
| | | | | | | | GB: U02231(1- |
| | | | | | | | 322 of 322) |
| MG343 | 440355 | 439318 | — | — | — | — | MG343(108- |
| | | | | | | | 452 of 1038) |
| | | | | | | | GB: U01811(1- |
| | | | | | | | 345 of 345) |
| MG344 | 441180 | 440362 | GP: U17036_2 | lipase-esterase (lip1) {Mycoplasma mycoides} | 26.6667 | 47.5 | MG344(575- |
| | | | | | | | 767 of 819) |
| | | | | | | | GB: U02222(1- |
| | | | | | | | 193 of 193) |
| MG345 | 443878 | 441194 | SP: P00956 | isoleucyl-tRNA synthetase (ileS) {Escherichia coli} | 33.2963 | 56.2708 | MG345(1115- |
| | | | | | | | 782 of 2685) |
| | | | | | | | GB: U02196(1- |
| | | | | | | | 334 of 334) |
| MG345 | 443878 | 441194 | SP: P00956 | isoleucyl-tRNA synthetase (ileS) {Escherichia coli} | 33.2963 | 56.2708 | MG345(1811- |
| | | | | | | | 2134 of 2685) |
| | | | | | | | GB: U02254(1- |
| | | | | | | | 324 of 324) |
| MG348 | 446165 | 445200 | — | — | — | — | MG348(166- |
| | | | | | | | 459 of 966) |
| | | | | | | | GB: U01781(1- |
| | | | | | | | 292 of 292) |
| MG352 | 450222 | 450719 | GB: U11883_2 | hypothetical protein (GB: U11883_2) {Bacillus subtilis} | 33.3333 | 56.7901 | MG352(366- |
| | | | | | | | 498 of 498) |
| | | | | | | | GB: U02237(1- |
| | | | | | | | 133 of 310) |
| MG353 | 451048 | 450722 | — | — | — | — | MG353(327- |
| | | | | | | | 153 of 327) |
| | | | | | | | GB: U02237(136- |
| | | | | | | | 309 of 310) |
| MG357 | 455947 | 454769 | GB: L17320_2 | acetate kinase (ackA) {Bacillus subtilis} | 42.6735 | 65.5527 | MG357(342- |
| | | | | | | | 131 of 1179) |
| | | | | | | | GB: X61531(1- |
| | | | | | | | 211 of 211) |
| MG358 | 456590 | 457369 | GB: M21298_1 | Holliday junction DNA helicase (ruvA) | 26.2411 | 42.5532 | MG358(350- |
| | | | | {Escherichia coli} | | | 87 of 780) |
| | | | | | | | GB: U02233(1- |
| | | | | | | | 265 of 265) |
| MG361 | 459615 | 460100 | SP: P29394 | ribosomal protein L10 (rpL10) {Thermotoga maritima} | 29.8137 | 61.4907 | MG361(274- |
| | | | | | | | 486 of 486) |
| | | | | | | | GB: U02206(1- |
| | | | | | | | 213 of 345) |
| MG362 | 460126 | 460491 | SP: P02394 | ribosomal protein L7/L12 (‘A’type) (rpL7/L12) | 47.5 | 70 | MG362(1- |
| | | | | {Bacillus subtilis} | | | 107 of 366) |
| | | | | | | | GB: U02206(239- |
| | | | | | | | 345 of 345) |
| MG365 | 461682 | 462614 | GB: X63666_2 | methionyl-tRNA formyltransferase (fmt) | 24.43 | 50.8143 | MG365(292- |
| | | | | {Escherichia coli} | | | 1 of 933) |
| | | | | | | | GB: U02238(1- |
| | | | | | | | 292 of 349) |
| MG368 | 466410 | 465427 | GB: M96793_1 | fatty acid/phospholipid synthesis protein (plsX) | 28.972 | 52.3364 | MG368(227- |
| | | | | {Escherichia coli} | | | 1 of 984) |
| | | | | | | | GB: U01791(1- |
| | | | | | | | 227 of 326) |
| MG369 | 468083 | 466413 | — | — | — | — | MG369(1146- |
| | | | | | | | 1446 of 1671) |
| | | | | | | | GB: U01763(1- |
| | | | | | | | 300 of 300) |
| MG370 | 469123 | 468155 | SP: P23851 | hypothetical protein (SP: P23851) {Escherichia coli} | 26.9531 | 48.8281 | MG370(240- |
| | | | | | | | 599 of 969) |
| | | | | | | | GB: U02220(1- |
| | | | | | | | 360 of 360) |
| MG371 | 470084 | 469113 | GB: D26185_10 | hypothetical protein (GB: D26185_10) | 25.8065 | 47.0046 | MG371(349- |
| | | | | {Bacillus subtilis} | | | 689 of 972) |
| | | | | | | | GB: U02263(1- |
| | | | | | | | 341 of 341) |
| MG374 | 472891 | 472070 | — | — | — | — | MG374(1- |
| | | | | | | | 178 of 822) |
| | | | | | | | GB: U02250(159- |
| | | | | | | | 337 of 337) |
| MG375 | 474578 | 472887 | GB: M36594_1 | threonyl-tRNA synthetase (thrSv) {Bacillus subtilis} | 38.7097 | 60.7527 | MG375(1048- |
| | | | | | | | 1389 of 1692) |
| | | | | | | | GB: U02130(1- |
| | | | | | | | 342 of 342) |
| MG375 | 474578 | 472887 | GB: M36594_1 | threonyl-tRNA synthetase (thrSv) {Bacillus subtilis} | 38.7097 | 60.7527 | MG375(1530- |
| | | | | | | | 1692 of 1692) |
| | | | | | | | GB: U02250(1- |
| | | | | | | | 163 of 337) |
| MG378 | 477139 | 475529 | SP: P35868 | arginyl-tRNA synthetase (argS) | 33.6406 | 56.9124 | MG378(1364- |
| | | | | {Corynebacterium glutamicum} | | | 1047 of 1611) |
| | | | | | | | GB: U01740(1- |
| | | | | | | | 319 of 319) |
| MG378 | 477139 | 475529 | SP: P35868 | arginyl-tRNA synthetase (argS) | 33.6406 | 56.9124 | MG378(765- |
| | | | | {Corynebacterium glutamicum} | | | 456 of 1611) |
| | | | | | | | GB: U02168(1- |
| | | | | | | | 309 of 309) |
| MG379 | 477168 | 479003 | GB: L10328_106 | glucose inhibited division protein (gidA) | 40.7346 | 61.9366 | MG379(900- |
| | | | | {Escherichia coli} | | | 1184 of 1836) |
| | | | | | | | GB: U01812(1- |
| | | | | | | | 285 of 285) |
| MG385 | 484699 | 483992 | — | — | — | — | MG385(234- |
| | | | | | | | 6 of 708) |
| | | | | | | | GB: U02112(1- |
| | | | | | | | 229 of 229) |
| MG385 | 484699 | 483992 | — | — | — | — | MG385(523- |
| | | | | | | | 708 of 708) |
| | | | | | | | GB: U02239(1- |
| | | | | | | | 186 of 320) |
| MG385 | 484699 | 483992 | — | — | — | — | MG385(528- |
| | | | | | | | 259 of 708) |
| | | | | | | | GB: U02246(1- |
| | | | | | | | 270 of 270) |
| MG386 | 489552 | 484705 | GB: U11381_1 | cytadherence-accessory protein (hmwl) | 31.1755 | 49.4037 | MG386(1294- |
| | | | | {Mycoplasma pneumoniae} | | | 1628 of 4848) |
| | | | | | | | GB: U02175(1- |
| | | | | | | | 335 of 335) |
| MG386 | 489552 | 484705 | GB: U11381_1 | cytadherence-accessory protein (hmwl) | 31.1755 | 49.4037 | MG386(2274- |
| | | | | {Mycoplasma pneumoniae} | | | 1991 of 4848) |
| | | | | | | | GB: X61519(1- |
| | | | | | | | 283 of 284) |
| MG386 | 489552 | 484705 | GB: U11381_1 | cytadherence-accessory protein (hmwl) | 31.1755 | 49.4037 | MG386(3247- |
| | | | | {Mycoplasma pneumoniae} | | | 3420 of 4848) |
| | | | | | | | GB: U02126(1- |
| | | | | | | | 174 of 174) |
| MG386 | 489552 | 484705 | GB: U11381_1 | cytadherence-accessory protein (hmwl) { | 31.1755 | 49.4037 | MG386(3842- |
| | | | | Mycoplasma pneumoniae} | | | 4196 of 4848) |
| | | | | | | | GB: U02192(1- |
| | | | | | | | 355 of 355) |
| MG386 | 489552 | 484705 | GB: U11381_1 | cytadherence-accessory protein (hmwl) | 31.1755 | 49.4037 | MG386(767- |
| | | | | {Mycoplasma pneumoniae} | | | 1281 of 4848) |
| | | | | | | | GB: U02245(2- |
| | | | | | | | 515 of 515) |
| MG388 | 491004 | 490702 | GB: U00016_19 | hypothetical protein (GB: U00016_19) | 30.9278 | 56.701 | MG388(285- |
| | | | | {Mycobacterium leprae} | | | 1 of 303) |
| | | | | | | | GB: U02265(1- |
| | | | | | | | 285 of 339) |
| MG389 | 491530 | 491150 | — | — | — | — | MG389(320- |
| | | | | | | | 129 of 381) |
| | | | | | | | GB: U01813(1- |
| | | | | | | | 192 of 192) |
| MG390 | 493516 | 491537 | SP: P37608 | lactococcin transport ATP-binding protein (lcnDR3) | 22.3421 | 46.5331 | MG390(1395- |
| | | | | {Lactococcus lactis} | | | 1744 of 1980) |
| | | | | | | | GB: U02218(1- |
| | | | | | | | 350 of 350) |
| MG390 | 493516 | 491537 | SP: P37608 | lactococcin transport ATP-binding protein (lcnDR3) | 22.3421 | 46.5331 | MG390(1400- |
| | | | | {Lactococcus lactis} | | | 1174 of 1980) |
| | | | | | | | GB: U02248(1- |
| | | | | | | | 227 of 227) |
| MG391 | 494967 | 493627 | GB: D17450_1 | aminopeptidase {Mycoplasma salivarium} | 41.2921 | 60.3933 | MG391(1- |
| | | | | | | | 217 of 1341) |
| | | | | | | | GB: U02268(256- |
| | | | | | | | 472 of 472) |
| MG391 | 494967 | 493627 | GB: D17450_1 | aminopeptidase {Mycoplasma salivarium} | 41.2921 | 60.3933 | MG391(412- |
| | | | | | | | 735 of 1341) |
| | | | | | | | GB: U01801(1- |
| | | | | | | | 324 of 324) |
| MG391 | 494967 | 493627 | GB: D17450_1 | aminopeptidase {Mycoplasma salivarium} | 41.2921 | 60.3933 | MG391(412- |
| | | | | | | | 735 of 1341) |
| | | | | | | | GB: U01802(1- |
| | | | | | | | 324 of 324) |
| MG392 | 496615 | 494987 | GB: L10132_2 | heat shock protein (groEL) | 51.5209 | 71.4829 | MG392(1394- |
| | | | | {Bacillus stearothermophilus} | | | 1629 of 1629) |
| | | | | | | | GB: U02268(1- |
| | | | | | | | 236 of 472) |
| MG392 | 496615 | 494987 | GB: L10132_2 | heat shock protein (groEL) | 51.5209 | 71.4829 | MG392(181- |
| | | | | {Bacillus stearothermophilus} | | | 1 of 1629) |
| | | | | | | | GB: U02252(1- |
| | | | | | | | 181 of 296) |
| MG393 | 496960 | 496631 | GB: D17398_1 | heat shock protein 60-like protein (PggroES) | 39.5604 | 54.9451 | MG393(330- |
| | | | | {Porphyromonas gingivalis} | | | 231 of 330) |
| | | | | | | | GB: U02252(197- |
| | | | | | | | 296 of 296) |
| MG394 | 498306 | 497089 | SP: P06192 | serine hydroxymethyltransferase (glyA) | 55.303 | 70.7071 | MG394(328- |
| | | | | {Salmonella typhimurium} | | | 683 of 1218) |
| | | | | | | | GB: U02131(1- |
| | | | | | | | 356 of 356) |
| MG395 | 499890 | 498319 | — | — | — | — | MG395(457- |
| | | | | | | | 116 of 1572) |
| | | | | | | | GB: U02260(1- |
| | | | | | | | 342 of 342) |
| MG395 | 499890 | 498319 | — | — | — | — | MG395(763- |
| | | | | | | | 979 of 1572) |
| | | | | | | | GB: X61530(1- |
| | | | | | | | 217 of 217) |
| MG399 | 503976 | 502831 | SP: P33253 | ATP synthase beta chain (atpD) | 80.9524 | 89.418 | MG399(447- |
| | | | | {Mycoplasma gallisepticum} | | | 852 of 1146) |
| | | | | | | | GB: U01752(1- |
| | | | | | | | 406 of 406) |
| MG400 | 505099 | 504263 | SP: P33257 | ATP synthase gamma chain (atpG) | 37.9433 | 62.0567 | MG400(160- |
| | | | | {Mycoplasma gallisepticum} | | | 711 of 837) |
| | | | | | | | GB: U01703(1- |
| | | | | | | | 552 of 552) |
| MG401 | 506655 | 505102 | SP: P33252 | ATP synthase alpha chain (atpA) | 63.3911 | 79.5761 | MG401(973- |
| | | | | {Mycoplasma gallisepticum} | | | 1554 of 1554) |
| | | | | | | | GB: U01727(1- |
| | | | | | | | 583 of 598) |
| MG405 | 509012 | 508137 | GB: X64256_2 | adenosinetriphosphatase (atpB) | 36.4261 | 63.9175 | MG405(75- |
| | | | | {Mycoplasma gallisepticum} | | | 1 of 876) |
| | | | | | | | GB: U01728(1- |
| | | | | | | | 75 of 299) |
| MG406 | 509319 | 508981 | SP: P15362 | transport system permease protein P69 (P69) | 40 | 57.1429 | MG406(339- |
| | | | | {Mycoplasma hyorhinis} | | | 84 of 339) |
| | | | | | | | GB: U01728(44- |
| | | | | | | | 299 of 299) |
| MG410 | 513042 | 512056 | GB: L10328_89 | peripheral membrane protein B (pstB) {Escherichia coli} | 50.813 | 70.3252 | MG410(301- |
| | | | | | | | 941 of 987) |
| | | | | | | | GB: U01707(1- |
| | | | | | | | 640 of 640) |
| MG411 | 514991 | 513030 | GB: X75297_1 | periplasmic phosphate permease homolog (AG88) | 30.7692 | 56.2753 | MG411(406- |
| | | | | {Mycobacterium tuberculosis} | | | 632 of 1962) |
| | | | | | | | GB: U01746(1- |
| | | | | | | | 227 of 229) |
| MG412 | 516124 | 514994 | — | — | — | — | MG412(252- |
| | | | | | | | 1 of 1131) |
| | | | | | | | GB: U01702(1- |
| | | | | | | | 252 of 313) |
| MG412 | 516124 | 514994 | — | — | — | — | MG412(675- |
| | | | | | | | 563 of 1131) |
| | | | | | | | GB: U02101(1- |
| | | | | | | | 113 of 113) |
| MG413 | 518389 | 516248 | GB: L22432_4 | hypothetical protein (GB: L22432_4) | 25 | 54.1667 | MG413(1179- |
| | | | | {Mycoplasma capricolum} | | | 701 of 2142) |
| | | | | | | | GB: U01699(1- |
| | | | | | | | 480 of 480) |
| MG413 | 518389 | 516248 | GB: L22432_4 | hypothetical protein (GB: L22432_4) | 25 | 54.1667 | MG413(1535- |
| | | | | {Mycoplasma capricolum} | | | 1230 of 2142) |
| | | | | | | | GB: U01804(1- |
| | | | | | | | 305 of 305) |
| MG414 | 519355 | 516248 | — | — | — | — | MG414(438- |
| | | | | | | | 154 of 917) |
| | | | | | | | GB: U01695(1- |
| | | | | | | | 285 of 285) |
| MG416 | 521414 | 520371 | — | — | — | — | MG416(1- |
| | | | | | | | 39 of 1044) |
| | | | | | | | GB: U01744(580- |
| | | | | | | | 618 of 620) |
| MG416 | 521414 | 520371 | — | — | — | — | MG416(7- |
| | | | | | | | 351 of 1044) |
| | | | | | | | GB: U02102(1- |
| | | | | | | | 345 of 345) |
| MG418 | 522314 | 521877 | SP: P02410 | ribosomal protein L13 (rpL13) {Escherichia coli} | 41.3043 | 70.2899 | MG418(321- |
| | | | | | | | 438 of 438) |
| | | | | | | | GB: U01744(1- |
| | | | | | | | 118 of 620) |
| MG421 | 526696 | 524153 | SP: P07671 | excinuclease ABC subunit A (uvrA) {Escherichia coli} | 47.7541 | 68.5579 | MG421(1693- |
| | | | | | | | 1393 of 2544) |
| | | | | | | | GB: X61514(1- |
| | | | | | | | 301 of 301) |
| MG422 | 529493 | 526989 | — | — | — | — | MG422(2274- |
| | | | | | | | 2101 of 2505) |
| | | | | | | | GB: U02117(1- |
| | | | | | | | 174 of 174) |
| MG422 | 529493 | 526989 | — | — | — | — | MG422(2439- |
| | | | | | | | 2505 of 2505) |
| | | | | | | | GB: U02172(1- |
| | | | | | | | 67 of 318) |
| MG422 | 529493 | 526989 | — | — | — | — | MG422(35- |
| | | | | | | | 1 of 2505) |
| | | | | | | | GB: U02228(1- |
| | | | | | | | 35 of 304) |
| MG423 | 531216 | 529534 | — | — | — | — | MG423(1434- |
| | | | | | | | 1197 of 1683) |
| | | | | | | | GB: X61510(1- |
| | | | | | | | 238 of 238) |
| MG423 | 531216 | 529534 | — | — | — | — | MG423(161- |
| | | | | | | | 413 of 1683) |
| | | | | | | | GB: X61524(1- |
| | | | | | | | 252 of 255) |
| MG423 | 531216 | 529534 | — | — | — | — | MG423(1683- |
| | | | | | | | 1455 of 1683) |
| | | | | | | | GB: U02228(76- |
| | | | | | | | 304 of 304) |
| MG425 | 531668 | 533014 | SP: P23304 | ATP-dependent RNA helicase (deaD) {Escherichia coli} | 32.4121 | 58.0402 | MG425(989- |
| | | | | | | | 769 of 1347) |
| | | | | | | | GB: U01805(1- |
| | | | | | | | 220 of 220) |
| MG431 | 538290 | 537559 | GB: L27492_1 | triosephosphate isomerase (tim) {Thermotoga maritima} | 39.7541 | 61.8852 | MG431(463- |
| | | | | | | | 732 of 732) |
| | | | | | | | GB: U02109(1- |
| | | | | | | | 270 of 277) |
| MG437 | 542067 | 542981 | GB: M11330_1 | CDP-diglyceride synthetase (cdsA) {Escherichia coli} | 38.0165 | 55.3719 | MG437(679- |
| | | | | | | | 378 of 915) |
| | | | | | | | GB: U02189(2- |
| | | | | | | | 303 of 303) |
| MG441 | 546707 | 546300 | — | — | — | — | MG441(20- |
| | | | | | | | 318 of 408) |
| | | | | | | | GB: U02128(1- |
| | | | | | | | 299 of 299) |
| MG447 | 552444 | 550804 | GB: L08897_1 | hypothetical protein (GB: L08897_1) | 34.058 | 55.0725 | MG447(319- |
| | | | | {Mycoplasma gallisepticum} | | | 645 of 1641) |
| | | | | | | | GB: U01788(1- |
| | | | | | | | 327 of 327) |
| MG451 | 555612 | 554431 | SP: P13927 | elongation factor TU (tuf) {Mycoplasma genitalium} | 100 | 100 | MG451(927- |
| | | | | | | | 586 of 1182) |
| | | | | | | | GB: U02255(1- |
| | | | | | | | 342 of 342) |
| MG453 | 556435 | 557310 | GB: L12272_1 | UDP-glucose pyrophosphorylase (gtaB) | 48.0287 | 65.233 | MG453(491- |
| | | | | {Bacillus subtilis} | | | 181 of 876) |
| | | | | | | | GB: U02258(1- |
| | | | | | | | 311 of 311) |
| MG455 | 557724 | 558944 | GB: M77668_1 | tyrosyl tRNA synthetase (tyrS) | 38.539 | 61.7128 | MG455(604- |
| | | | | {Bacillus stearothermophilus} | | | 362 of 1221) |
| | | | | | | | GB: U02247(5- |
| | | | | | | | 247 of 247) |
| MG456 | 559941 | 558940 | — | — | — | — | MG456(256- |
| | | | | | | | 568 of 1002) |
| | | | | | | | GB: U01790(1- |
| | | | | | | | 312 of 312) |
| MG458 | 563307 | 562783 | SP: Q02522 | hypoxanthine-guanine phosphoribosyltransferase (hpt) | 38.3721 | 66.8605 | MG458 (295- |
| | | | | {Lactococcus lactis} | | | 24 of 525) |
| | | | | | | | GB: U02193(1- |
| | | | | | | | 272 of 272) |
| MG459 | 563818 | 563312 | GB: M64978_2 | surface exclusion protein (prgA) (Plasmid pCF10) | 28.3582 | 49.2537 | MG459(330- |
| | | | | {Enterococcus faecalis} | | | 1 of 507) |
| | | | | | | | GB: U01725(1- |
| | | | | | | | 330 of 638) |
| MG460 | 563991 | 564926 | SP: P33572 | L-lactate dehydrogenase (ldh) | 50.3226 | 67.7419 | MG460(1 - |
| | | | | {Mycoplasma hyopneumoniae} | | | 136 of 936) |
| | | | | | | | GB: U01725(503- |
| | | | | | | | 638 of 638) |
| MG462 | 567638 | 566187 | GB: M55072_1 | glutamyl-tRNA synthetase (gltX) | 42.887 | 65.272 | MG462(1452- |
| | | | | {Bacillus stearothermophilus} | | | 1081 of 1452) |
| | | | | | | | GB: U02122(9- |
| | | | | | | | 379 of 379) |
| MG463 | 568404 | 567628 | GB: D26185_105 | high level kasgamycin resistance (ksgA) | 35.6164 | 53.8813 | MG463(777- |
| | | | | {Bacillus subtilis} | | | 409 of 777) |
| | | | | | | | GB: U01719(36- |
| | | | | | | | 405 of 405) |
| MG467 | 570988 | 570056 | GB: X75422_1 | heterocyst maturation protein (devA) {Anabaena sp.} | 39.899 | 63.1313 | MG467(40- |
| | | | | | | | 352 of 933) |
| | | | | | | | GB: U01741(1- |
| | | | | | | | 313 of 313) |
| MG469 | 578578 | 577268 | SP: P34028 | chromosomal replication initiator protein (dnaA) | 30.9469 | 57.2748 | MG469(845- |
| | | | | {Spiroplasma citri} | | | 547 of 1311) |
| | | | | | | | GB: U02259(1- |
| | | | | | | | 299 of 299) |
| MG469 | 578578 | 577268 | SP: P34028 | chromosomal replication initiator protein (dnaA) | 30.9469 | 57.2748 | MG469(855- |
| | | | | {Spiroplasma citri} | | | 1206 of 1311) |
| | | | | | | | GB: U02145(1- |
| | | | | | | | 352 of 352) |

[0279] TABLE 1(d)

| UID | Old_id(s) | | |
|---|---|---|---|
| MG001 | MORF-20072 | | |
| MG002 | MORF-19817 | | |
| MG003 | MORF-19818 | MORF-20073 | |
| MG004 | MORF-19819 | MORF-20074 | |
| MG005 | MORF-20075 | | |
| MG006 | MORF-20076 | | |
| MG007 | MORF-19820 | | |
| MG008 | MORF-20077 | | |
| MG009 | MORF-20078 | | |
| MG010 | MORF-20079 | | |
| MG011 | MORF-19821 | MORF-19822 | |
| MG012 | MORF-20080 | | |
| MG013 | MORF-19823 | MORF-20080 | MORF-20081 |
| MG014 | MORF-20082 | | |
| MG015 | MORF-20084 | | |
| MG016 | MORF-19824 | | |
| MG017 | MORF-19825 | | |
| MG018 | MORF-20085 | | |
| MG019 | MORF-20086 | | |
| MG020 | MORF-20088 | | |
| MG021 | MORF-20089 | | |
| MG022 | MORF-20091 | | |
| MG023 | MORF-20092 | | |
| MG024 | MORF-19826 | MORF-20093 | |
| MG025 | MORF-20094 | | |
| MG026 | MORF-20095 | | |
| MG027 | MORF-19827 | | |
| MG028 | MORF-19828 | | |
| NG029 | MORF-19829 | | |
| MG030 | MORF-20096 | | |
| MG031 | MORF-19830 | MORF-20097 | |
| MG032 | MORF-20099 | | |
| MG033 | MORF-20100 | | |
| MG034 | MORF-20101 | | |
| MG035 | MORF-20102 | | |
| MG036 | MORF-20103 | | |
| MG037 | MORF-20104 | | |
| MG038 | MORF-20105 | | |
| MG039 | MORF-19831 | MORF-20106 | |
| MG040 | MORF-20107 | | |
| MG042 | MORF-19832 | MORF-20108 | |
| MG043 | MORF-20110 | | |
| MG044 | MORF-20111 | | |
| MG045 | MORF-19833 | | |
| MG046 | MORF-20112 | | |
| MG047 | MORF-20113 | | |
| MG048 | MORF-19834 | MORF-20114 | MORF-20115 |
| MG049 | MORF-20114 | MORF-20115 | |
| MG050 | MORF-20117 | | |
| MG051 | MORF-19835 | MORF-20118 | |
| MG052 | MORF-20119 | | |
| MG053 | MORF-20120 | | |
| MG054 | MORF-20120 | MORF-20121 | |
| MG055 | MORF-19836 | | |
| MG056 | MORF-20122 | | |
| MG057 | MORF-20123 | | |
| MG058 | MORF-20124 | | |
| MG059 | MORF-20124 | MORF-20125 | |
| MG060 | MORF-20126 | | |
| MG061 | MORF-19838 | | |
| MG062 | MORF-19839 | MORF-20127 | MORF-20128 |
| MG063 | MORF-19840 | MORF-20128 | |
| MG064 | MORF-19841 | MORF-19842 | |
| MG065 | MORF-19843 | MORF-20129 | |
| MG066 | MORF-19844 | MORF-20130 | |
| MG067 | MORF-19845 | | |
| MG068 | MORF-20131 | | |
| MG069 | MORF-19847 | MORF-20135 | |
| MG070 | MORF-20136 | | |
| MG071 | MORF-19848 | MORF-19849 | MORF-19850 |
| MORF-19851 | MORF-20137 | | |
| MG072 | MORF-19852 | MORF-19853 | MORF-19854 |
| MORF-20138 | | | |
| MG073 | MORF-20139 | | |
| MG074 | MORF-19855 | | |
| MG075 | MORF-19856 | MORF-19857 | |
| MG076 | MORF-19858 | | |
| MG077 | MORF-20140 | | |
| MG078 | MORF-19859 | MORF-20141 | |
| MG079 | MORF-20142 | | |
| MG080 | MORF-20143 | | |
| MG081 | MORF-20144 | | |
| MG082 | MORF-20145 | | |
| MG083 | MORF-20146 | | |
| MG084 | MORF-20147 | | |
| MG085 | MORF-20147 | MORF-20148 | |
| MG086 | MORF-19860 | MORF-19861 | |
| MG087 | MORF-20149 | | |
| MG088 | MORF-20150 | | |
| MG089 | MORF-20151 | MORF-20152 | |
| MG090 | MORF-19862 | | |
| MG091 | MORF-20153 | | |
| MG092 | MORF-20154 | | |
| MG093 | MORF-20155 | | |
| MG094 | MORF-20156 | | |
| MG095 | MORF-19863 | | |
| MG096 | MORF-20157 | | |
| MG097 | MORF-20158 | | |
| MG098 | MORF-20159 | | |
| MG099 | MORF-19864 | MORF-20160 | |
| MG100 | MORF-19865 | MORF-20161 | |
| MG101 | MORF-19866 | | |
| MG102 | MORF-20162 | | |
| MG103 | MORF-19867 | MORF-19868 | |
| MG104 | MORF-20163 | | |
| MG105 | MORF-19869 | | |
| MG106 | MORF-20164 | MORF-20165 | |
| MG107 | MORF-20164 | MORF-20165 | |
| MG108 | MORF-20166 | | |
| MG109 | MORF-20167 | | |
| MG110 | MORF-20168 | | |
| MG111 | MORF-20169 | | |
| MG112 | MORF-20170 | | |
| MG113 | MORF-19870 | MORF-20171 | MORF-20172 |
| MG114 | MORF-20171 | MORF-20172 | |
| MG116 | MORF-19871 | | |
| MG117 | MORF-19872 | | |
| MG118 | MORF-20173 | | |
| MG119 | MORF-19873 | MORF-20174 | |
| MG120 | MORF-19874 | | |
| MG121 | MORF-19875 | MORF-20175 | |
| MG122 | MORF-20176 | | |
| MG123 | MORF-19876 | | |
| MG124 | MORF-20177 | | |
| MG125 | MORF-19877 | | |
| MG126 | MORF-20178 | | |
| MG127 | MORF-20179 | | |
| MG128 | MORF-20180 | | |
| MG129 | MORF-20181 | | |
| MG130 | MORF-20182 | | |
| MG132 | MORF-20183 | | |
| MG133 | MORF-19878 | | |
| MG134 | MORF-20184 | | |
| MG135 | MORF-20185 | | |
| MG136 | MORF-20186 | MORF-20187 | |
| MG137 | MORF-20186 | MORF-20187 | |
| MG138 | MORF-20188 | | |
| MG139 | MORF-19879 | | |
| MG140 | MORF-19884 | | |
| MG141 | MORF-19885 | MORF-20192 | |
| MG142 | MORF-19886 | MORF-20193 | |
| MG143 | MORF-20194 | | |
| MG144 | MORF-19887 | | |
| MG145 | MORF-20195 | | |
| MG146 | MORF-20196 | | |
| MG147 | MORF-19888 | MORF-19889 | |
| MG148 | MORF-19890 | | |
| MG149 | MORF-19891 | | |
| MG150 | MORF-19893 | MORF-20197 | |
| MG151 | MORF-19893 | MORF-20198 | |
| MG152 | MORF-19895 | MORF-20199 | |
| MG153 | MORF-19894 | | |
| MG154 | MORF-19896 | MORF-20200 | |
| MG156 | MORF-19897 | | |
| MG157 | MORF-20201 | | |
| MG158 | MORF-20202 | | |
| MG159 | MORF-19898 | | |
| MG161 | MORF-19900 | MORF-20203 | |
| MG162 | MORF-19899 | MORF-19900 | |
| MG163 | MORF-20204 | | |
| MG165 | MORF-20205 | | |
| MG166 | MORF-19901 | MORF-20206 | |
| MG167 | MORF-19901 | MORF-20207 | |
| MG168 | MORF-19902 | MORF-20208 | |
| MG169 | MORF-20209 | | |
| MG170 | MORF-20210 | | |
| MG171 | MORF-20211 | | |
| MG172 | MORF-20212 | | |
| MG175 | MORF-20213 | | |
| MG176 | MORF-20214 | | |
| MG177 | MORF-19903 | MORF-20215 | |
| MG178 | MORF-20216 | | |
| MG179 | MORF-19904 | MORF-20217 | |
| MG180 | MORF-20218 | | |
| MG181 | MORF-19905 | | |
| MG182 | MORF-20219 | | |
| MG183 | MORF-20219 | | |
| MG184 | MORF-20220 | | |
| MG185 | MORF-20221 | | |
| MG186 | MORF-19907 | | |
| MG187 | MORF-19908 | MORF-19909 | MORF-20225 |
| MG188 | MORF-20226 | MORF-20227 | |
| MG189 | MORF-20226 | MORF-20227 | |
| MG190 | MORF-20228 | | |
| MG191 | MORF-19910 | MORF-19911 | MORF-20229 |
| MG192 | MORF-19911 | MORF-19912 | MORF-20230 |
| MG194 | MORP-19913 | MORF-20234 | |
| MG195 | MORF-20235 | | |
| MG196 | MORF-20236 | | |
| MG199 | MORF-19914 | | |
| MG200 | MORF-19915 | MORF-20237 | |
| MG201 | MORF-19916 | MORF-20239 | |
| MG202 | MORF-19917 | | |
| MG203 | MORF-19918 | MORF-19919 | MORF-20240 |
| MG204 | MORF-20241 | MORF-20242 | |
| MG205 | MORF-20243 | | |
| MG206 | MORF-20244 | | |
| MG207 | MORF-19920 | | |
| MG208 | MORF-19921 | | |
| MG209 | MORF-20245 | | |
| MG210 | MORF-20246 | | |
| MG211 | MORF-19922 | | |
| MG212 | MORF-19924 | MORF-20247 | MORF-20248 |
| MG213 | MORF-20248 | | |
| MG214 | MORF-20249 | | |
| MG215 | MORF-20250 | | |
| MG216 | MORF-20251 | | |
| MG217 | MORF-20252 | | |
| MG218 | MORF-19926 | MORF-19927 | MORF-20253 |
| MG219 | MORF-19928 | MORF-19930 | MORF-20253 |
| MG220 | MORF-19931 | | |
| MG221 | MORF-20255 | | |
| MG222 | MORF-20256 | | |
| MG223 | MORF-19932 | | |
| MG224 | MORF-20257 | | |
| MG225 | MORF-20258 | | |
| MG226 | MORF-20259 | | |
| MG227 | MORF-20260 | | |
| MG228 | MORF-19933 | | |
| MG229 | MORF-19934 | MORF-20261 | |
| MG230 | MORF-19935 | | |
| MG231 | MORF-20262 | | |
| MG232 | MORF-20263 | | |
| MG234 | MORF-20264 | | |
| MG235 | MORF-19936 | MORF-20265 | |
| MG236 | MORF-19937 | | |
| MG237 | MORF-19938 | | |
| MG238 | MORF-19939 | MORF-20266 | |
| MG239 | MORF-20267 | | |
| MG240 | MORF-20268 | | |
| MG241 | MORF-19940 | MORF-19941 | MORF-19942 |
| MG242 | MORF-19943 | | |
| MG243 | MORF-19945 | | |
| MG244 | MORF-20269 | | |
| MG245 | MORF-19946 | | |
| MG246 | MORF-19947 | | |
| MG247 | MORF-20270 | | |
| MG248 | MORF-19948 | | |
| MG249 | MORF-19949 | MORF-20271 | |
| MG250 | MORF-20272 | | |
| MG251 | MORF-19950 | MORF-20273 | |
| MG252 | MORF-20274 | | |
| MG253 | MORF-20275 | | |
| MG254 | MORF-20276 | | |
| MG255 | MORF-19951 | MORF-19952 | |
| MG256 | MORF-19953 | | |
| MG258 | MORF-19954 | MORF-20277 | |
| MG259 | MORF-20278 | | |
| MG260 | MORF-19955 | MORF-19956 | MORF-20279 |
| MG261 | MORF-19958 | MORF-20282 | |
| MG262 | MORF-20283 | | |
| MG263 | MORF-20285 | | |
| MG264 | MORF-20286 | MORF-20287 | |
| MG265 | MORF-20286 | MORF-20287 | |
| MG266 | MORF-20288 | | |
| MG267 | MORF-19959 | MORF-19960 | |
| MG268 | MORF-20290 | | |
| MG269 | MORF-20291 | | |
| MG270 | MORF-20292 | | |
| MG271 | MORF-20293 | | |
| MG272 | MORF-19961 | MORF-19962 | MORF-20294 |
| MG273 | MORF-20295 | | |
| MG274 | MORF-20296 | | |
| MG275 | MORF-20297 | | |
| MG276 | MORF-20298 | | |
| MG277 | MORF-19963 | MORF-20299 | |
| MG278 | MORF-19964 | MORF-20300 | |
| MG279 | MORF-19965 | | |
| MG280 | MORF-19966 | MORF-20301 | |
| MG281 | MORF-19967 | MORF-19968 | |
| MG282 | MORF-20302 | | |
| MG283 | MORF-20303 | | |
| MG284 | MORF-19969 | MORF-19970 | MORF-19971 |
| MG285 | MORF-19969 | MORF-19970 | MORF-19971 |
| MG286 | MORF-19972 | | |
| MG288 | MORF-20306 | | |
| MG289 | MORF-20307 | | |
| MG290 | MORF-20308 | | |
| MG291 | MORF-20309 | | |
| MG292 | MORF-20310 | | |
| MG293 | MORF-20311 | | |
| MG294 | MORF-19974 | MORF-20312 | |
| MG295 | MORF-20313 | | |
| MG296 | MORF-19975 | | |
| MG297 | MORF-20314 | | |
| MG298 | MORF-19976 | MORF-20315 | |
| MG299 | MORF-20316 | | |
| MG300 | MORF-20317 | | |
| MG301 | MORF-19977 | MORF-20318 | |
| MG302 | MORF-19978 | | |
| MG303 | MORF-20319 | | |
| MG304 | MORF-20320 | | |
| MG305 | MORF-19979 | MORF-20321 | |
| MG306 | MORF-19980 | | |
| MG307 | MORF-19981 | MORF-19982 | |
| MG308 | MORF-20323 | | |
| MG309 | MORF-19983 | MORF-19984 | |
| MG310 | MORF-20324 | | |
| MG311 | MORF-20325 | | |
| MG312 | MORF-20326 | | |
| MG314 | MORF-19985 | MORF-19986 | |
| MG315 | MORF-19987 | MORF-19988 | MORF-20327 |
| MG316 | MORF-19988 | MORF-20327 | |
| MG317 | MORF-20328 | MORF-20329 | |
| MG318 | MORF-19989 | MORF-19990 | |
| MG319 | MORF-20330 | | |
| MG320 | MORF-19991 | | |
| MG321 | MORF-19992 | | |
| MG322 | MORF-19993 | MORF-20331 | |
| MG323 | MORF-19994 | MORF-20332 | |
| MG324 | MORF-19995 | MORF-20333 | |
| MG326 | MORF-20334 | | |
| MG327 | MORF-20335 | | |
| MG328 | MORF-19996 | MORF-20336 | |
| MG329 | MORF-19997 | MORF-20337 | |
| MG330 | MORF-20338 | MORF-20339 | |
| MG331 | MORF-20339 | | |
| MG332 | M0RF-20340 | | |
| MG333 | MORF-19998 | | |
| MG334 | MORF-20341 | | |
| MG336 | MORF-20343 | MORF-20344 | |
| MG337 | MORF-19999 | | |
| MG338 | MORF-20000 | | |
| MG339 | MORF-20001 | MORF-20345 | |
| MG340 | M0RF-20006 | MORF-20348 | |
| MG341 | MORF-20349 | | |
| MG342 | MORF-20350 | | |
| MG343 | MORF-20007 | | |
| MG344 | MORF-20008 | | |
| MG345 | MORF-20351 | | |
| MG346 | MORF-20352 | | |
| MG348 | MORF-20009 | | |
| MG349 | MORF-20010 | | |
| MG350 | MORF-20011 | | |
| MG351 | MORF-20353 | | |
| MG352 | MORF-20354 | | |
| MG353 | MORF-20355 | | |
| MG354 | MORF-20013 | MORF-20014 | |
| MG355 | MORF-20015 | MORF-20016 | MORF-20356 |
| MG356 | MORF-20357 | | |
| MG357 | MORF-20358 | | |
| MG358 | MORF-20017 | MORF-20018 | MORF-20019 |
| MORF-20359 | | | |
| MG359 | MORF-20019 | MORF-20359 | MORF-20360 |
| MG360 | MORF-20361 | | |
| MG361 | MORF-20362 | | |
| MG362 | MORF-20363 | | |
| MG364 | MORF-20364 | | |
| MG365 | MORF-20020 | MORF-20365 | |
| MG366 | MORF-20021 | | |
| MG367 | MORF-20366 | | |
| MG368 | MORF-20022 | MORF-20366 | MORF-20367 |
| MG369 | MORF-20022 | MORF-20023 | |
| MG370 | MORF-20368 | | |
| MG371 | MORF-20368 | MORF-20369 | |
| MG372 | MORF-20370 | | |
| MG373 | MORF-20024 | | |
| MG374 | MORF-20025 | | |
| MG375 | MORF-20371 | | |
| MG376 | MORF-20026 | | |
| MG377 | MORF-20027 | | |
| MG378 | MORF-20372 | | |
| MG379 | MORF-20373 | | |
| MG380 | MORF-20374 | | |
| MG381 | MORF-20028 | | |
| MG382 | MORF-20375 | | |
| MG383 | MORF-20376 | | |
| MG384 | MORF-20029 | MORF-20377 | |
| MG385 | MORF-20031 | MORF-20378 | |
| MG386 | MORF-20032 | MORF-20379 | MORF-20381 |
| MG387 | MORF-20382 | | |
| MG388 | MORF-20383 | | |
| MG389 | MORF-20033 | | |
| MG390 | MORF-20034 | MORF-20384 | |
| MG391 | MORF-20034 | MORF-20035 | MORF-20385 |
| MG392 | MORF-20036 | MORF-20037 | MORF-20386 |
| MG393 | MORF-20038 | | |
| MG394 | MORF-20387 | | |
| MG395 | MORF-20039 | | |
| MG396 | MORF-20388 | | |
| MG397 | MORF-20040 | MORF-20041 | |
| MG398 | MORF-20042 | | |
| MG399 | MORF-20389 | | |
| MG400 | MORF-20390 | | |
| MG401 | MORF-20043 | MORF-20391 | |
| MG402 | MORF-20392 | | |
| MG403 | MORF-20393 | | |
| MG404 | MORF-20394 | | |
| MG405 | MORF-20395 | MORF-20396 | |
| MG406 | MORF-20395 | MORF-20396 | |
| MG407 | MORF-20044 | MORF-20397 | |
| MG408 | MORF-20398 | | |
| MG409 | MORF-20045 | | |
| MG410 | MORF-20046 | MORF-20399 | |
| MG411 | MORF-20400 | | |
| MG412 | MORF-20047 | | |
| MG413 | MORF-20401 | | |
| MG414 | MORF-20048 | | |
| MG415 | MORF-20049 | | |
| MG416 | MORF-20050 | MORF-20051 | |
| MG417 | MORF-20402 | | |
| MG418 | MORF-20052 | | |
| MG419 | MORF-20053 | | |
| MG420 | MORF-20403 | | |
| MG421 | MORF-20404 | | |
| MG422 | MORF-20054 | MORF-20055 | |
| MG423 | MORF-20056 | | |
| MG425 | MORF-20406 | | |
| MG427 | MORF-20057 | | |
| MG428 | MORF-20058 | | |
| MG429 | MORF-20059 | MORF-20407 | |
| MG430 | MORF-20408 | | |
| MG431 | MORF-20409 | | |
| MG432 | MORF-20410 | | |
| MG433 | MORF-20411 | | |
| MG435 | MORF-20060 | MORF-20412 | |
| MG436 | MORF-20060 | MORF-20412 | |
| MG437 | MORF-20413 | | |
| MG438 | MORF-20414 | | |
| MG439 | MORF-20061 | | |
| MG440 | MORF-20062 | | |
| MG441 | MORF-20063 | | |
| MG442 | MORF-20415 | | |
| MG443 | MORF-20064 | | |
| MG444 | MORF-20065 | MORF-20416 | |
| MG445 | MORF-20417 | | |
| MG447 | MORF-20418 | | |
| MG448 | MORF-20419 | MORF-20420 | |
| MG449 | MORF-20419 | MORF-20420 | |
| MG450 | MORF-20066 | | |
| MG451 | MORF-20421 | | |
| MG452 | MORF-20067 | | |
| MG453 | MORF-20422 | | |
| MG454 | MORF-20423 | MORF-20424 | |
| MG455 | MORF-20423 | MORF-20424 | |
| MG456 | MORF-20068 | | |
| MG457 | MORF-20069 | MORF-20425 | |
| MG458 | MORF-20426 | | |
| MG459 | MORF-20070 | | |
| MG460 | MORF-20427 | | |
| MG461 | MORF-20428 | | |
| MG462 | MORF-20429 | | |
| MG463 | MORF-20430 | | |
| MG464 | MORF-20431 | | |
| MG467 | MORF-20432 | | |
| MG468 | MORF-20283 | | |
| MG469 | MORF-20434 | | |
| MG470 | MORF-20071 | MORF-20435 | |

[0280] TABLE 2

| UID | end5 | end3 | gene_len |
|---|---|---|---|
| MG016 | 19253 | 19756 | 504 |
| MG017 | 19825 | 20352 | 528 |
| MG027 | 30092 | 30544 | 453 |
| MG028 | 30547 | 31149 | 603 |
| MG064 | 74066 | 77683 | 3618 |
| MG076 | 102870 | 102457 | 414 |
| MG105 | 133569 | 134168 | 600 |
| MG117 | 143310 | 143951 | 642 |
| MG147 | 186138 | 187262 | 1125 |
| MG185 | 211445 | 213547 | 2103 |
| MG186 | 216017 | 216766 | 750 |
| MG199 | 237094 | 236594 | 501 |
| MG202 | 239826 | 240191 | 366 |
| MG207 | 247523 | 247906 | 384 |
| MG211 | 250997 | 251437 | 441 |
| MG223 | 268011 | 269243 | 1233 |
| MG230 | 276166 | 276624 | 459 |
| MG236 | 280663 | 281082 | 420 |
| MG241 | 286884 | 288743 | 1860 |
| MG243 | 290976 | 291323 | 348 |
| MG246 | 293936 | 294778 | 843 |
| MG256 | 306819 | 307586 | 768 |
| MG267 | 325157 | 324813 | 345 |
| MG279 | 341181 | 340528 | 654 |
| MG284 | 346853 | 347248 | 396 |
| MG286 | 348260 | 348847 | 588 |
| MG296 | 364414 | 364028 | 387 |
| MG306 | 377974 | 376796 | 1179 |
| MG321 | 402922 | 400121 | 2802 |
| MG331 | 415622 | 414987 | 636 |
| MG333 | 416716 | 416339 | 378 |
| MG349 | 446576 | 447787 | 1212 |
| MG350 | 447790 | 448722 | 933 |
| MG354 | 451197 | 451607 | 411 |
| MG366 | 462619 | 464619 | 2001 |
| MG372 | 471234 | 470080 | 1155 |
| MG373 | 472066 | 471224 | 843 |
| MG376 | 474892 | 474581 | 312 |
| MG377 | 475479 | 474901 | 579 |
| MG381 | 479570 | 480223 | 654 |
| MG397 | 502420 | 500723 | 1698 |
| MG415 | 520238 | 519929 | 310 |
| MG419 | 523215 | 522355 | 861 |
| MG427 | 533270 | 533692 | 423 |
| MG428 | 533806 | 534318 | 513 |
| MG436 | 542092 | 541739 | 354 |
| MG439 | 545378 | 544563 | 816 |
| MG440 | 546154 | 545381 | 774 |
| MG449 | 553295 | 552864 | 432 |
| MG450 | 554269 | 553559 | 711 |
| MG452 | 555665 | 556447 | 783 |
| MG468 | 318330 | 319202 | 873 |

[0281] TABLE 3
Whole Genome Sequencing Strategy

| Stage | Description |
|---|---|
| Random small insert and large | Randomly shear genomic DNA on the |
| insert library construction | order of 2 kb and 15-20 kb, respectively |
| Library plating | Maximize random selection of small |
| | insert and large insert clones for |
| | template production |
| High-throughput DNA | Sequence xxx,xxxx templates from both |
| sequencing | ends (>99% genome coverage) |
| Assembly (TIGR Assembler, | Assembly of sequence fragments into |
| GRASTA) | contigs |
| Gap closure | |
| a. Physical gaps | Order all contigs into a circular genome |
| | and provide templates for closure of all |
| | physical gaps |
| b. Sequence gaps | Complete the genome by primer walking |
| Editing | Visual inspection and resolution of all |
| | sequence ambiguities when possible, |
| | including frameshifts |
| Annotation | Identification and description of all |
| | ORF's, putative identification, role |
| | assignments |

[0282] TABLE 4
Computer simulation of random sequencing
experiments where L = 580,000 and w = 400.

| Clones | Percent of | | Number | Average |
|---|---|---|---|---|
| sequenced | genome | Base pairs | of double | gap length |
| (n) | unsequenced | unsequenced | strand gaps | (bp) |
| 1000 | 50.18 | 291014 | 501 | 580 |
| 2000 | 25.18 | 146016 | 503 | 289 |
| 4000 | 6.34 | 36759 | 253 | 145 |
| 6000 | 1.60 | 9254 | 97 | 96 |
| 7250 | 0.67 | 3886 | 48 | 80 |
| 8000 | 0.40 | 2330 | 32 | 72 |
| 10000 | 0.10 | 586 | 10 | 59 |

[0283] TABLE 5
Mycoplasma genitalium - EcoRI fragments

| 5′ Enzyme | Start Res | 3′ Enzyme | End Res | Length | M W |
|---|---|---|---|---|---|
| EcoRI | 572231 | EcoRI | 1530 | 9367 | 5763365 |
| EcoRI | 1531 | EcoRI | 6723 | 5193 | 3195384 |
| EcoRI | 6724 | EcoRI | 15283 | 8560 | 5266795 |
| EcoRI | 15284 | EcoRI | 25781 | 10498 | 6459359 |
| EcoRI | 25782 | EcoRI | 35532 | 9751 | 5999831 |
| EcoRI | 35533 | EcoRI | 39821 | 4289 | 2639037 |
| EcoRI | 39822 | EcoRI | 43179 | 3358 | 2066196 |
| EcoRI | 43180 | EcoRI | 43707 | 528 | 324906 |
| EcoRI | 43708 | EcoRI | 49410 | 5703 | 3509174 |
| EcoRI | 49411 | EcoRI | 62708 | 13298 | 8182420 |
| EcoRI | 62709 | EcoRI | 71387 | 8679 | 5340230 |
| EcoRI | 71388 | EcoRI | 80769 | 9382 | 5772840 |
| EcoRI | 80770 | EcoRI | 84845 | 4076 | 2507946 |
| EcoRI | 84846 | EcoRI | 89622 | 4777 | 2939580 |
| EcoRI | 89623 | EcoRI | 93383 | 3761 | 2314332 |
| EcoRI | 93384 | EcoRI | 94573 | 1190 | 732268 |
| EcoRI | 94574 | EcoRI | 102229 | 7656 | 4710994 |
| EcoRI | 102230 | EcoRI | 107347 | 5118 | 3149292 |
| EcoRI | 107348 | EcoRI | 110797 | 3450 | 2122895 |
| EcoRI | 110798 | EcoRI | 114909 | 4112 | 2530290 |
| EcoRI | 114910 | EcoRI | 116440 | 1531 | 942140 |
| EcoRI | 116441 | EcoRI | 137514 | 21074 | 12967294 |
| EcoRI | 137515 | EcoRI | 144092 | 6578 | 4047534 |
| EcoRI | 144093 | EcoRI | 155336 | 11244 | 6918646 |
| EcoRI | 155337 | EcoRI | 162136 | 6800 | 4184109 |
| EcoRI | 162137 | EcoRI | 163907 | 1771 | 1089750 |
| EcoRI | 163908 | EcoRI | 169816 | 5909 | 3636217 |
| EcoRI | 169817 | EcoRI | 171885 | 2069 | 1273325 |
| EcoRI | 171886 | EcoRI | 176630 | 4745 | 2920129 |
| EcoRI | 176631 | EcoRI | 221880 | 45250 | 27844584 |
| EcoRI | 221881 | EcoRI | 225692 | 3812 | 2345923 |
| EcoRI | 225693 | EcoRI | 228254 | 2562 | 1576700 |
| EcoRI | 228255 | EcoRI | 277826 | 49572 | 30503951 |
| EcoRI | 277827 | EcoRI | 282740 | 4914 | 3023818 |
| EcoRI | 282741 | EcoRI | 285470 | 2730 | 1679928 |
| EcoRI | 285471 | EcoRI | 292152 | 6682 | 4111409 |
| EcoRI | 292153 | EcoRI | 293879 | 1727 | 1062607 |
| EcoRI | 293880 | EcoRI | 312725 | 18846 | 11596154 |
| EcoRI | 312726 | EcoRI | 347231 | 34506 | 21232617 |
| EcoRI | 347232 | EcoRI | 352330 | 5099 | 3137714 |
| EcoRI | 352331 | EcoRI | 362310 | 9980 | 6140434 |
| EcoRI | 362311 | EcoRI | 377990 | 15680 | 9648201 |
| EcoRI | 377991 | EcoRI | 390080 | 12090 | 7439090 |
| EcoRI | 390081 | EcoRI | 402043 | 11963 | 7361170 |
| EcoRI | 402044 | EcoRI | 408452 | 6409 | 3943775 |
| EcoRI | 408453 | EcoRI | 419230 | 10778 | 6631662 |
| EcoRI | 419231 | EcoRI | 422653 | 3423 | 2106066 |
| EcoRI | 422654 | EcoRI | 425383 | 2730 | 1679735 |
| EcoRI | 425384 | EcoRI | 426391 | 1008 | 620235 |
| EcoRI | 426392 | EcoRI | 439467 | 13076 | 8046286 |
| EcoRI | 439468 | EcoRI | 444297 | 4830 | 2971763 |
| EcoRI | 444298 | EcoRI | 444940 | 643 | 395631 |
| EcoRI | 444941 | EcoRI | 452525 | 7585 | 4667018 |
| EcoRI | 452526 | EcoRI | 455595 | 3070 | 1888976 |
| EcoRI | 455596 | EcoRI | 461533 | 5938 | 3653550 |
| EcoRI | 461534 | EcoRI | 467016 | 5483 | 3373523 |
| EcoRI | 467017 | EcoRI | 483871 | 16855 | 10370549 |
| EcoRI | 483872 | EcoRI | 487269 | 3398 | 2090889 |
| EcoRI | 487270 | EcoRI | 488085 | 816 | 502090 |
| EcoRI | 488086 | EcoRI | 488496 | 411 | 252914 |
| EcoRI | 488497 | EcoRI | 498574 | 10078 | 6201025 |
| EcoRI | 498575 | EcoRI | 499113 | 539 | 331666 |
| EcoRI | 499114 | EcoRI | 516146 | 17033 | 10480304 |
| EcoRI | 516147 | EcoRI | 524998 | 8852 | 5446303 |
| EcoRI | 524999 | EcoRI | 527362 | 2364 | 1454583 |
| EcoRI | 527363 | EcoRI | 529777 | 2415 | 1485826 |
| EcoRI | 529778 | EcoRI | 530256 | 479 | 294749 |
| EcoRI | 530257 | EcoRI | 531045 | 789 | 485489 |
| EcoRI | 531046 | EcoRI | 533591 | 2546 | 1566584 |
| EcoRI | 533592 | EcoRI | 549000 | 15409 | 9480966 |
| EcoRI | 549001 | EcoRI | 550638 | 1638 | 1007852 |
| EcoRI | 550639 | EcoRI | 563713 | 13075 | 8045103 |
| EcoRI | 563714 | EcoRI | 566925 | 3212 | 1976345 |
| EcoRI | 566926 | EcoRI | 572230 | 5305 | 3264227 |

[0284]

| MG# | Identification | MatchAcc | % ID | Length | MG# | Identification | MatchAcc | % ID | Length |
|---|---|---|---|---|---|---|---|---|---|
| *MG394 | Uridine Kinase (udk) (Escherichia coli) | SP: P31218 | 34.5 | 204 | *MG390 | arginyl-tRNA synthetase (argS) (Corynebacterium glutamicum) | SP: P35868 | 33.6 | 431 |
| Purine ribonucleotide biosynthesis | | | | | *MG114 | asparaginyl-tRNA synthetase (asnS) (Escherichia coli) | GP: M33145_1 | 41.5 | 449 |
| *MG107 | 5′ guanylate kinase (gmk) (Escherichia coli) | GP: L10328_14 | 42.6 | 183 | *MG036 | aspartyl-tRNA synthetase (aspS) (Thermus aqusticus) | SP: P36419 | 40.9 | 563 |
| *MG175 | adenylate kinase (adk) (Bacillus stearothermophilus) | GP: M88104_2 | 32.2 | 210 | *MG258 | cysteinyl-tRNA synthetase (cryS) (Bacillus subtilis) | GP: D26185_158 | 34.3 | 437 |
| *MG058 | phosphoribosyloyrophosphate synthetase (prs) | GP: D26185_114 | 44.4 | 310 | *MG474 | glutamyl-tRNA synthetase (gtiX) (Bacillus stearothermophilus) | GP: M55072_1 | 42.9 | 480 |
| | (Bacillus subtilis) | | | | | | | | |
| Pyrimidine nibonucleotide biosynthesis | | | | | *MG256 | glycyl-tRNA synthetase (Bombyx mori) | GP: L06106_1 | 35.9 | 574 |
| Salvage of nucleosides and nucleotides | | | | | *MG035 | histidyl-tRNA synthetase (hisS) (Mycobacterium leprae) | GP: U00011_2 | 30.7 | 386 |
| *MG284 | adenine phosphoribosyltransferase (apt) | GP: M14040_1 | 34.1 | 153 | *MG357 | Isoleucyl-tRNA synthetase (ileS) (Escherichia coli) | SP: P00958 | 33.3 | 921 |
| | (Escherichia coli) | | | | | | | | |
| *MG052 | cytidine deaminase (cdd) (Mycoplasma pirum) | GP: L13289_4 | 38.2 | 121 | *MG274 | leucyl-tRNA synthetase (leuS) (Bacillus stearothermophilus) | GP: M88581_1 | 43.4 | 799 |
| *MG340 | cytidylate kinase (cmk) (Bacillus subtilis) | SP: P38493 | 40.4 | 215 | *MG137 | lysyl-tRNA synthetase (lysS) (Bacillus subtilis) | GP: D26185_144 | 45.6 | 490 |
| MG276 | deoxyguanosine/deoxyadenosine kinase(I) subunit 2 | GP: U01881_2 | 29.5 | 164 | *MG377 | methlonyl-tRNa lormytransferase (lmt) (Escherichia coli) | GP: X63668_2 | 24.1 | 304 |
| | (Lactobacillus acrdophilus) | | | | *MG021 | methlonyl-tRNA synthetase (metS) (Bacillus subtilis) | GP: D26185_101 | 37.5 | 515 |
| *MG470 | hypoxanthine-guanine phosphorlbosyltransferase | SP: O02522 | 38.4 | 170 | *MG085 | peptidyl-tRNA hyorolase homolog (ptn) (Borrelia burgdorieri) | GP: L32144_1 | 38.2 | 154 |
| | (hpt) (Lactococcus lactus) | | | | *MG201 | phenylalanyl-tRNA synthetase beta chain (pheT) (Bacillus subtilis) | SP: P17922 | 26.0 | 677 |
| *MG048 | punne-nucleoside phosphorylase (deoD) | GP: U14003_295 | 44.3 | 228 | *MG200 | phenylalanyl-tRNA synthetase beta-subunit (pheS) (Escherichia coli) | GP: V00291_5 | 35.1 | 320 |
| | (Escherichia coli) | | | | | | | | |
| *MG034 | thymidine kinase (Bacillus subtilis) | GP: M97678_5 | 48.1 | 187 | *MG292 | prolyl-tRNA synthetase (proS) (Escherichia coli) | GP: M97858_1 | 22.7 | 438 |
| MG051 | thymidine phosphorylase (deoA) | GP: L13289_3 | 52.7 | 416 | *MG005 | Seryl-tRNA synthetase (serS) (Bacillus subtilis) | GP: D26185_77 | 42.6 | 416 |
| | (Mycoplasma plrum) | | | | | | | | |
| *MG030 | uracil phosphorlbosyltransferase (upp) | GP: Z27121_3 | 44.9 | 206 | *MG387 | threonyl-tRNA synthetase (thrSv) (Bacillus subtills) | GP: M36594_1 | 38.7 | 558 |
| | (Mycoplasma hominis) | | | | | | | | |
| Sugar-nucleotide biosynthesis and conversions | | | | | *MG457 | tRNA (guanine-N1)-methyltransferase (trmD) (Salmonelia | SP: P36245 | 40.8 | 223 |
| *MG119 | UDP-glucose 4-epinerase (galE) (Escherichia coli) | SP: P09147 | 34.1 | 322 | | typhimurium) | | | |
| *MG465 | UDP-glucose pyrophosphorylase (gtaB) | GP: L12272_1 | 48.0 | 277 | *MG127 | tryptophanyl-tRNA synthetase (trpS) (Bacillus subtills) | GP: M24068_1 | 41.2 | 324 |
| | (Bacillus subtilis) | | | | *MG466 | tyrosyl tRNA synthetase (tyrS) (Bacillus stearothermophilus) | GP: M77668_1 | 38.5 | 418 |
| Regulatory functions | | | | | *MG344 | valyl-tRNA synthetase (valS) (Bacillus subtilis) | SP: O06873 | 38.5 | 857 |
| *MG396 | GTP-binding protein (obg) (Bacillus subtilis) | GP: M24537_2 | 39.6 | 426 | Degradation of proteins, peptides, and glycopeptides | | | | |
| *MG399 | GTP-binding protein era homolog (spg) | SP: P37214 | 27.4 | 273 | *MG334 | aminopeptidase P (pepP) (Escherichia coli) | GP: D00398_1 | 30.5 | 254 |
| | (Streptococcus mulans) | | | | | | | | |
| *MG460 | pilB homolog transcription repressor | GP: Z33052_1 | 53.5 | 128 | *MG403 | aminopeptidase (Mycoplasma salivarium) | GP: D17450_1 | 44.6 | 303 |
| | (Mycoplasma capricolum) | | | | | | | | |
| *MG420 | PILB protein MOTIF (Neisseria gonorrhoeae) | SP: P14930 | 49.2 | 127 | *MG244 | ATP-dependent protease (lon) (Bacillus subtilis) | SP: P37945 | 43.6 | 753 |
| *MG105 | virulence associated protein homolog (vacB) | GP: U14003_91 | 29.2 | 560 | *MG367 | ATP-dependent protease binding subunit (ctpB) (Escherichia coli) | GP: M29364_2 | 47.7 | 709 |
| | (Escherichia coli) | | | | | | | | |
| | | | | | *MG067 | glutamic acid specific protease prepropetide (Staphylococcus | GP: D00730_1 | 28.8 | 250 |
| Replication | | | | | | aureus) | | | |
| Degradation of DNA | | | | | MG224 | IgA1 protease (Haemophilus Influenzae) | GP: M87491_1 | 32.2 | 675 |
| MG032 | ATP-dependent nuclease (addA) (Bacillus subtilis) | GP: M63489_1 | 26.8 | 706 | MG186 | oligoendopeptidase F (pepF) (Lactococcus lactis) | GP: Z32522_1 | 30.0 | 442 |
| MG240 | endonuclease IV (nfo) (Escherichia coli) | SP: P12638 | 29.4 | 267 | MG321 | proline iminopeptidase (pip) (Bacillus coagulans) | GP: D11037_1 | 29.2 | 209 |
| DNA replication, restinction, modification, recombination, and repair | | | | | MG020 | proline iminopeptidase (pip) (Neisseria gonorrhoaeae) | GP: Z25461_2 | 37.5 | 281 |
| *MG481 | chromosomal replication initiator protein (dnaA) | SP: P34028 | 30.9 | 432 | *MG046 | sialoglycoprotease (gcp) (Pasteurella haemolytica) | GP: M62384_1 | 36.4 | 313 |
| | (Spiroplasma citri) | | | | | | | | |
| *MG210 | DNA gyrase subunit A (Mycoplasma genitalium) | GP: U09251_4 | 37.4 | 782 | Nucleoproteins | | | | |
| *MG004 | DNA gyrase subunit A (Mycoplasma genitalium) | GP: U09251_4 | 99.9 | 835 | Protein modification and translation factors | | | | |
| *MG003 | DNA gyrase subunit B (gyrB) | GP: U09251_3 | 99.2 | 645 | *MG090 | elongation factor G (fus) (Thermus aquaticus) | SP: P13551 | 59.2 | 683 |
| | (Mycoplasma genitalium) | | | | | | | | |
| *MG249 | DNA helicase II (mutB1) (Haernophilus influenzae) | GP: M99049_1 | 36.0 | 715 | *MG026 | elongation factor P (efp) (Escherichia coli) | GP: U14003_62 | 26.4 | 162 |
| *MG259 | DNA ligase (lig) (Escherichia coli) | GP: M24278_1 | 38.2 | 657 | *MG445 | elongation factor Ts (lsf) (Spiroplasma citri) | GP: M31161_2 | 39.1 | 294 |
| *MG269 | DNA polymerase I (poll) MOTIF | GP: L11920_1 | 29.9 | 837 | *MG463 | elongation factor TU (luf) (Mycoplasma genitalium) | SP: P13927 | 100.0 | 383 |
| | (Mycobacterium tuberculosis) | | | | | | | | |
| *MG031 | DNA polymerase III (polC) (Mycoplasma pulmonis) | GP: U06833_1 | 38.1 | 1352 | *MG176 | methionine amino peptidase (Bacillus subtilis) | GP: D00619_5 | 36.3 | 245 |
| *MG001 | DNA polymerase III beta subunit (dnaN) | GP: U09251_1 | 100.0 | 97 | *MG263 | peptide chain release factor I (RF-1) (Escherichia coli) | GP: M11519_1 | 43.2 | 320 |
| | (Mycoplasma genitalium) | | | | | | | | |
| MG007 | DNA polymerase III subunit (dnaH) MOTIF | GP: D26185_83 | 22.7 | 142 | *MG108 | polypeptide delormylase (lormylmethionine delormylase) (def) | SP: P27251 | 36.9 | 107 |
| | (Bacillus subtilis) | | | | | | | | |
| *MG432 | DNA polymerase III subunit (dnaH) | GP: D26185_83 | 49.1 | 224 | | MOTIF (Escherichia coli) | | | |
| | (Bacillus subtilis) | | | | | | | | |
| *MG268 | DNA polymerase III, alpha chain (dnaE) | GP: M19334_4 | 31.9 | 843 | MG109 | protein phosphatase 2C homolog (ptc1) MOTIF (Saccharomyces | SP: P35182 | 27.5 | 141 |
| *MG010 | DNA primase (dnaE) MOTIF (Clostridium | SP: P33655 | 25.7 | 174 | | cerevisiae) | | | |
| | acatobutylicum) (Escherichia coli) | | | | | | | | |
| *MG255 | DNA primase (dnaE) (Bacillus subtilis) | GP: M10040_1 | 27.3 | 587 | MG110 | protein serine/threonine kinase MOTIF (Arabidopsis thaliana) | PIR: S36944 | 33.7 | 242 |
| *MG123 | DNA topolsomerase I (topA) (Bacillus subtilis) | GP: L27797_2 | 38.9 | 658 | *MG146 | protein synthesis initiation factor 2 (inIB) (Bacillus subtilis) | GP: M34836_1 | 48.0 | 619 |
| *MG433 | excinuclease ABC subunit A (uvrA) | SP: P07671 | 47.8 | 842 | *MG447 | ribosome releasing factor (irr) (Escherichia coli) | GP: D26552_57 | 34.9 | 169 |
| | (Escherichia coli) | | | | | | | | |
| *MG075 | excinuclease ABC subunit B (uvrB) | SP: P07025 | 48.0 | 662 | *MG291 | transcription elongation factor (greA) (Rickettsia prowazekll) | SP: P27640 | 40.1 | 135 |
| | (Escherichia coli) | | | | | | | | |
| *MG270 | formamidopyrimidine-DNA glycosylase (tpg) | SP: P19210 | 37.6 | 272 | *MG202 | translation initiation factor IF3 (inIC) Bacillus stearothermophilus) | GP: X16188_1 | 31.3 | 133 |
| | (Bacillus firmus) | | | | | | | | |
| *MG391 | glucose inhibited division protein (gidA) | GP: L10328_106 | 40.3 | 600 | Ribosomal proteins synthesis end modification | | | | |
| | (Escherichia coli) | | | | | | | | |
| *MG392 | glucose inhibited division protein (gidB) | GP: L10328_105 | 24.8 | 143 | *MG084 | ribosomal protein L1 (rpL1) (Bacillus stearothermophilis) | SP: P04447 | 48.2 | 221 |
| | (Escherichia coli) | | | | | | | | |
| *MG370 | Holliday junction DNA helicase (ruvA) | GP: M21298_1 | 26.2 | 153 | *MG373 | ribosomal protein L10 (rpL10) (Thermologa maritime) | SP: P29394 | 29.8 | 162 |
| | (Escherichia coli) | | | | | | | | |
| *MG371 | Holliday junction DNA helicase (ruvB) | GP: M21298_2 | 34.7 | 297 | *MG083 | ribosomal protein L11 (RPL11) (Thermologa maritime) | SP: P29395 | 51.8 | 140 |
| | (Escherichia coli) | | | | | | | | |
| MG187 | methyltransferase (ssoIM) | GP: M97479_2 | 42.5 | 314 | *MG430 | ribosomal protein L13 (Escherichia coli) | SP: P02410 | 39.9 | 137 |
| | (Shigella sonnei) | | | | | | | | |
| *MG349 | recombination protein (recA) | GP: L25893_1 | 46.6 | 292 | *MG165 | ribosomal protein L14 (rpL14) (Bacillus stearothermophilus) | SP: P04450 | 63.1 | 121 |
| | (Staphylococcus aureus) | | | | | | | | |
| *MG095 | replicative DNA helicase (dnaB) | SP: P03005 | 33.1 | 439 | *MG173 | ribosomal protein L15 (rpL15) (Mycoplasma capricolum) | SP: P10138 | 41.9 | 144 |
| | (Escherichia coli) | | | | | | | | |
| MG450 | restriction-modification enzyme EcoD | GP: J01631_1 | 24.6 | 390 | *MG162 | ribosomal protein L16 (rpL16) (Mycoplasma capricolum) | SP: P02415 | 63.5 | 136 |
| | specificity subunit (nsdS) (Escherichia coli) | | | | *MG161 | ribosomal protein L17 (rpL17) (Bacillus subtilis) | GP: M26414_6 | 34.8 | 115 |
| *MG047 | S-adenosylmethlonine synthetase 2 (metX) | SP: P30869 | 43.8 | 363 | *MG171 | ribosomal protein L18 (rpL18) (Bacillus stearothermophilus) | GP: M57624_1 | 43.0 | 113 |
| | (Escherichia coli) | | | | | | | | |
| *MG092 | single-stranded DNA binding protein (ssb) | GP: U04997_2 | 21.8 | 162 | *MG456 | ribosomal protein L19 (rpL19) (Bacillus stearothermophilus) | SP: P30529 | 49.1 | 111 |
| | (Haemophilus Influenzae) | | | | | | | | |
| *MG209 | topoisomerase II subunit B (topIIB) | GP: L35044_2 | 52.4 | 630 | *MG158 | ribosomal protein L2 (rpL2) (Bacillus stearothermophilus) | SP: P04257 | 58.4 | 273 |
| | (Mycoplasma gallisepticum) | | | | | | | | |
| *MG098 | uracil DNA glycosylase (ung) (Escherichia coli) | GP: D13169_3 | 32.6 | 217 | *MG238 | ribosomal protein L21 (rpL21) (Bacillus subtilis) | SP: P26908 | 37.9 | 98 |
| | | | | | *MG160 | ribosomal protein L22 (rpL22) (Mycoplasma-like organism) | GP: M74770_4 | 49.0 | 103 |
| Transcription | | | | | *MG157 | ribosomal protein L23 (Bacillus stearothermophilus) | SP: P04454 | 38.7 | 89 |
| Degradation of RNA | | | | | *MG166 | ribosomal protein L24 (Bacillus stearothermophilus) | SP: P04455 | 44.6 | 83 |
| *MG379 | ribonuclease III (rnc) (Escherichia coli) | GP: X02673_1 | 30.2 | 118 | *MG239 | ribosomal protein L27 (rpL27) (Bacillus subtilis) | GP: K02665_2 | 64.4 | 88 |
| *MG477 | RNaseP C5 subunit (Mycoplasma capricolum) | GP: D14982_2 | 40.0 | 78 | *MG163 | ribosomal protein L29 (Thermologa mantima) | SP: P38514 | 41.7 | 59 |
| RNA synthesis, modification, and DNA transcription | | | | | *MG155 | ribosomal protein L3 (rpL3) (Mycoplasma capricolum) | SP: P10134 | 42.6 | 213 |
| *MG319 | ATP-dependent RNA helicase (deaD) | SP: P23304 | 23.1 | 369 | *MG335 | ribosomal protein L33 (Bacillus stearothermophilus) | SP: P23375 | 58.1 | 42 |
| | (Escherichia coli) | | | | | | | | |
| *MG437 | ATP-dependent RNA helicase (deaD) | SP: P23304 | 32.4 | 390 | *MG478 | ribosomal protein L34 (rpL34) (Escherichia coli) | GP: L10328_67 | 67.4 | 45 |
| | (Escherichia coli) | | | | | | | | |
| *MG352 | DNA-directed RNA polymerase beta' chain (rpoC) | SP: P00577 | 44.5 | 1348 | *MG156 | ribosomal protein L4 (rpL4) (Bacillus stearothermophilus) | SP: P28601 | 39.2 | 205 |
| | (Escherichia coli) | | | | | | | | |
| *MG018 | helicase (mol1) MOTIF (Saccharomyces cerevisiae) | SP: P32333 | 36.5 | 502 | *MG167 | ribosomal protein L5 (rpL5) (Bacillus stearothermophilus) | SP: P08895 | 57.5 | 178 |
| *MG145 | N-utilization substance protein A homolog (nusA) | SP: P32727 | 30.9 | 360 | *MG170 | ribosomal protein L6 (rpL6) (Mycoplasma capricolum) | SP: P04446 | 46.4 | 179 |
| | (Bacillus subtilis) | | | | | | | | |
| *MG180 | RNA polymerase alpha-core-subunit (rpoA) | GP: M26414_5 | 39.4 | 295 | *MG374 | ribosomal protein L7/L12 (‘A’type) (rpL7/L12)(Bacillus subtilis) | SP: P02394 | 47.5 | 118 |
| | (Bacillus subtilis) | | | | | | | | |
| *MG353 | RNA polymerase beta-subunit (rpoB) | GP: L24376_3 | 46.5 | 1144 | *MG094 | ribosomal protein L9 (rpL9) (Bacillus stearothermophilus) | GP: M57623_1 | 32.9 | 148 |
| | (Bacillus subtilis) | | | | | | | | |
| MG022 | RNA polymerase delta-subunit (rpoE) | GP: M21677_1 | 28.7 | 152 | *MG154 | ribosomal protein S10 (rpS10) (Thermologa maritime) | SP: P38518 | 48.9 | 91 |
| | (Bacillus subtilis) | | | | | | | | |
| *MG254 | RNA polymerase sigma-A factor (sigA) | SP: P33656 | 43.7 | 370 | *MG179 | ribosomal protein S11 (rpS11) (Escherichia coli) | GP: X02543_2 | 47.8 | 112 |
| | (Clostridium acetobutylicum) | | | | | | | | |
| *MG054 | transcription antitermination factor (nusG) | GP: D13303_4 | 30.9 | 171 | *MG088 | ribosomal protein S12 (rpS12) (Bacillus stearothermophilus) | SP: P09901 | 75.4 | 133 |
| | (Bacillus subtilis) | | | | *MG178 | ribosomal protein S13 (rpS13) (Bacillus subtilis) | GP: M26414_3 | 63.3 | 119 |
| Translation | | | | | *MG168 | ribosomal protein S14 (Mycoplasma capricolum) | GP: X06414_15 | 70.0 | 59 |
| Amino acyl tRNA synthetases and tRNA modification | | | | | *MG438 | ribosomal protein S15 (BS18) (Bacillus stearothermophilus) | SP: P05768 | 48.1 | 80 |
| *MG303 | alanyl-tRNA-synthetase (alaS) (Escherichia coli) | GP: J01581_1 | 33.8 | 795 | *MG458 | ribosomal protein S16 (BS17) (Bacillus subtilis) | SP: P21474 | 48.8 | 81 |
| Amino acid biosynthesis | | | | | Central Intermediary metabolism | | | | |
| Aromatic amino acid family | | | | | Amino sugars | | | | |
| Aspartate family | | | | | Degradation of polysaccharides | | | | |
| Branched chain family | | | | | *MG222 | bifunctional endo-1,4-beta-xylanase xyla precursor MOTIF | SP: P29126 | 37.6 | 240 |
| Glutamate family | | | | | (Ruminococcus flavefaciens) | | | | |
| Pyruvate family | | | | | Other | | | | |
| Sarine family | | | | | *MG369 | acetate kinase (Bacillus subtilis) | GP: L17320_2 | 42.7 | 391 |
| *MG406 | serine hydroxymethyltransferase (glyA) | SP: P06192 | 55.3 | 397 | *MG038 | glycerol kinase (glpK) (Escherchia coli) | GP: L19201_68 | 46.8 | 498 |
| | (Salmonella typhimurium) | | | | | | | | |

| | *MG304 | glycerophosphoryl diester phosphodiesterase (glpO) (Bacillus subtilis) | SP: P37965 | 30.4 | 235 |
|---|---|---|---|---|---|
| Biosynthesis of cofactors, prosthetic groups, and carriers | *MG310 | phosphotransacetylase (Closindium acetobutylicum) | SP: P39648 | 44.7 | 320 |
| Biotin | Phosphorus compounds | | | | |
| Folic acid | *MG363 | Inorganic pyrophosphalase (ppa) (Thermoplasma acidophilum) | SP: P37981 | 38.9 | 156 |

| | | | | | |
|---|---|---|---|---|---|
| *MG013 | 5,10-methylene-tetrahydrofolate dehydrogenase | GP: D10588_1 | 33.0 | 238 | Polyamine biosynthesis |
| | (foID) (Escherichia coli) | | | | Polysaccharides —(cytoplasmic) |
| *MG234 | dihydrofolate reductase | GP: X60681_1 | 33.1 | 166 | Sulfur metabolism |
| | (Lactococcus lactis) | | | | |

Hemo and porphyrin

| *MG264 | protoporphyrinogen oxidase (hernK) | GP: D28567_2 | 30.6 | 160 | Energy metabolism | | | | |
|---|---|---|---|---|---|---|---|---|---|
| | (Escherichia coli) | | | | | | | | |
| Locate | | | | | Aerobic | | | | |
| Menaquinone and ubiquinone | | | | | *MG039 | glycerol-3-phospate dehydrogenase (GUT2) (Saccharomyces | PIR: S48379 | 43.2 | 212 |
| Molybdopterin | | | | | | cerevisiae) | | | |
| Pantothenate | | | | | *MG472 | L-lactate dehydrogenase (ldh) (Mycoplasma hyopneumoniae) | SP: P33572 | 50.3 | 312 |
| Pyndoxne | | | | | MG283 | NADH oxidase (nox) (Enterococcus faecalis) | SP: P37061 | 39.2 | 433 |
| Riboflavin | | | | | Amino acids and amines | | | | |
| Thoredoxin, glutaredoxin, and glutathione | | | | | Anaerobic | | | | |
| | | | | | ATP-proton motive force interconversion | | | | |
| Cell envelope | | | | | *MG410 | ATP synthase epsilon chain (atpC) (Mycoplasma gallisepticum) | SP: P33255 | 36.9 | 129 |
| Membranes, lipoproteins, and portis | | | | | *MG411 | ATP synthase beta chain (atpD) (Mycoplasma gallisepticum) | SP: P33253 | 81.0 | 377 |
| MG328 | fibronectin-binding protein (fnbA) | GP: J04151_1 | 24.6 | 913 | *MG412 | ATP synthase gamma chain (atpG) (Mycoplasma gallisepticum) | SP: P33257 | 37.9 | 285 |
| | (Staphylococcus aureus) | | | | | | | | |
| MG040 | membrane lipoprotein (tmpC) (Treponema pallidum) | SP: P29724 | 30.9 | 248 | *MG413 | ATP synthase alpha chain (atpA) (Mycoplasma gallisepticum) | SP: P33252 | 63.4 | 517 |
| *MG087 | prolipoprotein diacylglyceryl transferase | GP: L13259_2 | 29.1 | 261 | *MG414 | ATP synthase delta chain (atpH) (Mycoplasma gallisepticum) | SP: P33254 | 33.9 | 168 |
| | (Salmonella typhimurium) | | | | | | | | |
| Murein sacculus and peptidoglycan | | | | | *MG415 | ATP synthase B chain (atpF) (Mycoplasma gallisepticum) | SP: P33258 | 36.6 | 192 |
| Surface polysaccharides, lipopolysaccharides and antigens | | | | | *MG416 | ATP synthase C chain (atpE) (Mycoplasma gallisepticum) | SP: P33258 | 50.0 | 77 |
| *MG368 | lic-1 operon protein (licA) MOTIF | GP: M27280_1 | 27.8 | 152 | *MG417 | adenosinetriphosphatase (atpB) (Mycoplasma gallisepticum) | GP: X64256_2 | 35.7 | 292 |
| | (Haemophilus Influenzae) | | | | | | | | |
| *MG060 | lipopolysaccharide biosynthesis protein | SP: P26401 | 36.1 | 185 | Electron transport | | | | |
| | (rfbV) MOTIF (Salmonella typhimurium) | | | | Entner-Doudoroff | | | | |
| *MG277 | surface protein antigen precursor (pag) | GP: D90354_1 | 25.5 | 797 | Fermentation | | | | |
| | MOTIF (Streptococcus sobrinus) | | | | Gluconeogenesis | | | | |
| Surface structures | | | | | Glycolysis | | | | |
| MG196 | attachment protein (mgpA) | SP: P20796 | 100.0 | 1443 | *MG063 | 1-phosphotructokinase (lruK) (Escherichia coli) | SP: P23539 | 26.3 | 268 |
| | (Mycoplasma genitalium) | | | | | | | | |
| MG190 | attachment protein repeat (mgpA) | SP: P20796 | 36.6 | 903 | *MG220 | 6-phosphotructokinase (phosphotructokinase) (phosphohexokinase) | SP: P20275 | 39.4 | 321 |
| | (Mycoplasma genitalium) | | | | | | | | |
| MG267 | attachment protein repeat (mgpA) | SP: P20796 | 38.0 | 963 | | (Spiroplasma citn) | | | |
| | (Mycoplasma genitalium) | | | | | | | | |
| MG188 | attachment protein repeat (mgpA) | SP: P20796 | 61.8 | 943 | *MG419 | enolase (Bacillus subtilis) | GP: L29475_4 | 54.1 | 425 |
| | (Mycoplasma genitalium) | | | | | | | | |
| MG069 | attachment protein repeat (mgpA) | SP: P20796 | 76.4 | 760 | *MG023 | fructose-bisphosphate aidolase (tsr) (Bacillus subtilis) | GP: M22039_4 | 46.0 | 282 |
| | (Mycoplasma genitalium) | | | | | | | | |
| MG189 | attachment protein repeat (mgpA) | SP: P20796 | 77.9 | 763 | *MG312 | glyceraldehyde-3-phosphate dehydrogenase (gap) (Clostridium | GP: X72219_1 | 56.1 | 329 |
| | (Mycoplasma genitalium) | | | | | | | | |
| MG232 | attachment protein repeat (mgpA) | SP: P20796 | 78.2 | 86 | | pasteurianum) | | | |
| | (Mycoplasma genitalium) | | | | | | | | |
| MG297 | attachment protein repeat (mgpA) | SP: P20796 | 80.2 | 756 | *MG112 | phosphoglucose Isomerase B (pgiB) (Bacillus stearothermophilus) | SP: P13376 | 34.8 | 424 |
| | (Mycoplasma genitalium) | | | | | | | | |
| MG141 | attachment protein repeat (mgpA) | SP: P20796 | 80.3 | 753 | *MG311 | phosphoglycerate kinase (Thermotoga maritima) | SP: P36204 | 51.3 | 383 |
| | (Mycoplasma genitalium) | | | | | | | | |
| *MG198 | attachment protein repeat (mgpA) | SP: P20796 | 81.3 | 753 | MG442 | phosphoglycerate mutase (pgm) (Bacillus subtilis) | GP: L29475_3 | 45.2 | 510 |
| | (Mycoplasma genitalium) | | | | | | | | |
| MG266 | attachment protein repeat (mgpA) | SP: P20796 | 82.2 | 753 | *MG221 | pyruvate kinase (pyk) (Lactococcus lactis) | GP: L07920_2 | 35.3 | 467 |
| | (Mycoplasma genitalium) | | | | | | | | |
| MG351 | attachment protein repeat (mgpA) | SP: P20796 | 84.3 | 734 | *MG443 | triosephosphate Isomerase (tim) Thermotoga maritima) | GP: L27492_1 | 39.8 | 247 |
| | (Mycoplasma genitalium) | | | | | | | | |
| *MG398 | Cylacherence-accessory protein (hmw1) | GP: U11381_1 | 34.1 | 876 | Pentose phosphate pathway | | | | |
| | (Mycoplasma pneumoniae) | | | | | | | | |
| MG323 | Cylacherence-accessory protein (hmw1) | GP: U11381_1 | 39.3 | 1015 | *MG272 | 6-phosphogluconate dehydrogenase (gnd) (Escherichia coli) | GP: M64324_1 | 29.9 | 440 |
| | (Mycoplasma pneumoniae) | | | | | | | | |
| *MG327 | Cylacherence-accessory protein (hmw3) | GP: M82965_1 | 41.1 | 669 | *MG066 | transketolase 1 (TK 1) (tk1A) (Escherichia coli) | SP: P27302 | 32.8 | 647 |
| | (Mycoplasma pneumoniae) | | | | | | | | |
| | | | | | Pyruvate dehydrogenase | | | | |
| Cellular processes | | | | | *MG280 | dihydrolipoamide acetyltransferase (pdhC) (Acholeplasma Isidiawi) | GP: M81753_3 | 45.2 | 524 |
| Cell division | | | | | *MG279 | lipoamide dehydrogenase component (E3) of pyruvate dehydrogenase | SP: P11959 | 38.4 | 453 |
| *MG469 | cell division protein (ftsH) (Bacillus subtilis) | GP: D26185_132 | 49.7 | 627 | | complex dihydrolipoamide dehydrog | | | |
| *MG308 | cell division protein (ftsY) (Escherichia coli) | GP: U00039_18 | 36.1 | 323 | *MG282 | pyruvate dehydrogenase E1-alpha subunit (pdhA) (Acholeplasma | GP: M81753_1 | 43.0 | 341 |
| *MG229 | cell division protein (ftsZ) (Staphylococcus aureus) | GP: U06462_1 | 30.9 | 274 | | ladiawi) | | | |
| Cell killing | | | | | *MG281 | pyruvate dehydrogenase E1-beta subunit (pdhB) (Acholeplasma | GP: M81753_2 | 55.0 | 317 |
| *MG150 | hemolysin (ftyC) (Serpulina hyodysenterise) | GP: X73141_2 | 26.3 | 234 | | ladiawi) | | | |
| MG225 | pre-procylotoxin (Helicobacter pylon) | GP: Z26883_1 | 36.1 | 789 | Sugars | | | | |
| Chaperones | | | | | *MG113 | D-ribulose-5-phosphate 3 epimerase (ctxEc) (Aicafigenes eutrophus) | GP: M64173_3 | 33.1 | 175 |
| *MG404 | groEL protein (Bacillus stearothermophilus) | GP: L10132_2 | 51.5 | 524 | *MG050 | deoxyribose-phosphate aidolase (deoC) (Mycoplasma pneumoniae) | GP: X13544_1 | 83.0 | 223 |
| *MG206 | heat shock protein (dnaJ) MOTIF (Coxiella burnatil) | GP: L36455_1 | 33.6 | 349 | MG408 | galactosidase acetyltransferase (Streptococcus mutans) | GP: M80797_2 | 40.3 | 135 |
| MG002 | heat shock protein (dnaJ) MOTIF | SP: P35514 | 40.0 | 60 | *MG053 | phosphomannomutase (cpsG) (Mycoplasma pirum) | GP: L13289_5 | 38.6 | 534 |
| | (Lactococcus lactis) | | | | | | | | |
| *MG019 | heat shock protein (dnaJ) (Lactococcus lactis) | SP: P35514 | 34.0 | 357 | TCA cycle | | | | |
| *MG207 | heat shock protein (grpE) (Bacillus subtilis) | GP: M84964_2 | 31.7 | 158 | | | | | |
| *MG405 | heat shock protein 60 (GroEL) like protein | GP: D17398_1 | 39.6 | 87 | Fatty acid and phospholipid metabolism | | | | |
| | (PggroES) (Porphyromonas gingivalis) | | | | *MG217 | 1-acyl-sn-glycerol-3-phosphate acetyltransferase (ptsC) (Borrella | GP: L32881_1 | 32.1 | 119 |
| *MG316 | heat shock protein 70 (HSP70) | GP: D30690_3 | 57.3 | 580 | | burgdorfen) | | | |
| | (Staphylococcus aureus) | | | | | | | | |
| Detoxification | | | | | *MG448 | CDP-diglyceride synthetase (cdsA) (Escherichia coli) | GP: M11330_1 | 38.0 | 120 |
| *MG008 | thiophene and furan oxidizer (tohF) | GP: D26185_60 | 31.9 | 456 | MG380 | fatty acid phosphol-pid synthesis protein (ptsX) (Escherichia coli) | GP: M96793_1 | 29.0 | 327 |
| | (Bacillus subtilis) | | | | | | | | |
| Protein and peptide secretion | | | | | MG086 | hydroxymethylglutaryl-CoA reductase (NADPH) | PIR: S24760 | 23.3 | 502 |
| | | | | | | (Nicotiana sylvestris) | | | |
| *MG139 | GTP-binding membrane protein (lepA) | GP: K00426_1 | 47.5 | 589 | *MG115 | phosphatidylglycerophosphate synthase (pgsA) (Escherichia coli) | GP: M12299_2 | 29.3 | 156 |
| | (Escherichia coli) | | | | | | | | |
| *MG182 | haemolysin secretion ATP-binding protein | SP: P11599 | 34.6 | 236 | | | | | |
| | (hlyB) MOTIF (Proteus vulgaris) | | | | Purines, Pyrimidines, nucleosides, and nucleotides | | | | |
| *MG074 | preprotein translocase (secA) (Bacillus sutilis) | GP: D10279_2 | 43.7 | 764 | 2′-Deoxyribonucleotide metabolism | | | | |
| *MG174 | preprotein translocase secY subunit (SecY) | SP: P10250 | 38.8 | 449 | *MG237 | ribonucleoside-diphosphate reductase (nrdE) (Salmonella | GP: X73226_1 | 54.1 | 703 |
| | (Mycoplasma capricolum) | | | | | | | | |
| MG215 | prolipoprotein signal peptidase (lsp) | GP: M83994_1 | 32.4 | 145 | | typhimurium) | | | |
| | (Staphylococcus aureus) | | | | | | | | |
| *MG049 | signal recognition particle protein (lfh) | SP: P37105 | 43.0 | 439 | *MG235 | ribonucleotide reductase 2 (nrdF) (Salmonella typhimurium) | SP: P17424 | 50.0 | 313 |
| | (Bacillus subtilis) | | | | | | | | |
| *MG243 | trigger factor (tig) Escherichia coli) | GP: M34066_1 | 24.6 | 391 | *MG125 | thioredoxin (trx) (Bacillus subtilis) | GP: J03294_1 | 36.1 | 98 |
| Transformation | | | | | *MG103 | thioredoxin reductase (trxB) (Escherichia coli) | GP: J03762_1 | 38.6 | 299 |
| MG326 | competence locus E (comE3) MOTIF | GP: L15202_4 | 30.5 | 239 | *MG233 | thymidylate synthase (thyA) (Staphylococcus aureus) | SP: P13954 | 56.6 | 311 |
| | (Bacillus subtilis) | | | | | | | | |
| | | | | | Nucleotide and nucleoside interconversions | | | | |
| *MG164 | ribosomal protein S17 (Mycoplasma capricolum) | SP: P10131 | 51.2 | 82 | *MG309 | 115 kDa protein (p115) (Mycoplasma hyorhinis) | GP: M34958_1 | 33.4 | 975 |
| *MG093 | ribosomal protein S18 (rpS18) (Escherichia coli) | GP: U14003_114 | 45.5 | 64 | *MG065 | heterocysl maturation protein (devA) (Anabaena sp.) | GP: X75422_1 | 35.3 | 221 |
| *MG159 | ribosomal protein S19 (Escherichia coli) | GP: X02613_6 | 58.6 | 86 | *MG479 | heterocysl maturation protein (devA) (Anabaena sp.) | GP: X75422_1 | 39.9 | 198 |
| *MG072 | ribosomal protein S2 (Spirulina platensis) | SP: P34831 | 34.8 | 247 | MG100 | hydrolase (aux2) (Agrobacterium rhizogenes) | GP: M61151_1 | 32.1 | 458 |
| *MG161 | ribosomal protein S3 (rpS3) | SP: P02353 | 46.7 | 212 | *MG223 | macrogolgin (Homo sapiens) | PIR: S37538 | 25.3 | 3055 |
| | (Mycoplasma capricolum) | | | | | | | | |
| *MG322 | ribosomal protein S4 (rpS4) (Bacillus subtilis) | GP: M59358_1 | 43.0 | 197 | *MG337 | magnesium-chelatase 30 kDa subunit (bchO) (Rhodobacter | SP: P26174 | 26.7 | 245 |
| *MG172 | ribosomal protein S5 (Bacillus stearothermophilus) | GP: M57621_1 | 56.0 | 157 | | capsulatus) | | | |
| *MG012 | ribosomal protein S6 modification protein (nmK) | SP: P17116 | 31.5 | 127 | *MG315 | membrane associated ATPase (cbrO)) (Propionibacterium | GP: U13043_1 | 30.0 | 227 |
| | MOTIF (Escherichia coli) | | | | | Ireudenrechii) | | | |
| *MG091 | ribosomal protein S6 (Escherichia coli) | SP: P02358 | 23.9 | 87 | MG376 | mobilization protein (mob13) MOTIF (Leuconostoc cenos) | GP: M95954_1 | 30.9 | 161 |
| *MG089 | ribosomal protein S7 rpS7) | SP: P22744 | 64.9 | 153 | MG372 | muc8 protein (muc8) (Salmonella typhimurium) | SP: P14303 | 22.1 | 331 |
| | (Bacillus stearothermophilus) | | | | | | | | |
| *MG169 | ribosomal protein S8 (Mycoplasma capriocolum) | SP: P04446 | 46.9 | 125 | *MG346 | nitrogen fixation protein (nifS) (Mycobacterium leprae) | GP: U00013_6 | 26.2 | 358 |
| *MG429 | ribosomal protein S9 (rpS9) | SP: P07842 | 52.0 | 125 | MG296 | nodulation protein F (host-specificity of nodulation protein A) | SP: P04686 | 34.9 | 86 |
| | (Bacillus stearothermophilus) | | | | | | | | |
| | | | | | | (Rhizobium legumnosarum) | | | |
| Transport and binding protein | | | | | MG299 | protein L (Peptostreptococcus magnus) | GP: L04466_1 | 31.1 | 663 |
| Amino acids, peptides and amines | | | | | *MG338 | protein V (IcrV) (Streptococcus sp.) | GP: X62467_1 | 28.3 | 478 |
| MG231 | aromatic amino acid transport protein (aroP) | GP: D26562_11 | 24.6 | 389 | *MG149 | protein X (Pseudomonas fluorescens) | GP: M35367_1 | 29.1 | 280 |
| | (Escherichia coli) | | | | | | | | |
| *MG314 | membrane transport protein (gtnQ) | GP: M61017_1 | 32.0 | 219 | MG132 | protein X (Spiroplasma citn) | GP: M31161_3 | 21.6 | 88 |
| | (Bacillus stearothermophilus) | | | | | | | | |
| *MG183 | membrane transport protein (gtnQ) | GP: M61017_1 | 37.4 | 210 | *MG288 | sensory rhodopsin II transducer (hiril) MOTIF (Natronobacterium | GP: Z35088_1 | 15.7 | 208 |
| | (Bacillus stearothermophilus) | | | | | | | | |
| *MG081 | oligopeptide transport ATP-binding protein | SP: P18765 | 47.9 | 336 | | pharaonis) | | | |
| | (amiE) (Streptococcus pneumoniae) | | | | *MG059 | small protein (smpB) (Escherichia coli) | GP: D12501_1 | 32.6 | 128 |
| *MG082 | oligopeptide transport ATP-binding protein (amiF) | SP: P18766 | 46.6 | 250 | | | | | |
| | (Streptococcus pneumoniae) | | | | Hypothetical | | | | |
| *MG080 | oligopeptide transport system permease protein | SP: P26904 | 33.5 | 269 | MG142 | hypothetical 130K protein (P1 operon) MOTIF (Mycoplasma | PIR: JS0069 | 55.4 | 512 |
| | (dciAC) (Bacillus subtilis) | | | | | pneumoniae | | | |
| *MG079 | oligopeptide transport system permease protein | SP: P24138 | 28.1 | 308 | MG199 | hypothetical 130K protein (P1 operon) (Mycoplasma pneumoniae) | PIR: JS0069 | 45.2 | 570 |
| | (oppB) (Bacillus subtilis) | | | | MG195 | hypothetical 28K protein (P1 operon) (Mycoplasma pneumoniae) | PIR: JS0068 | 61.7 | 239 |
| *MG042 | spermidine/putrescine transport ATP-binding protein | GP: M64519_1 | 41.9 | 262 | *MG342 | hypothetical protein (GB: D10165_3) (Escherichia coli) | GP: D10165_3 | 28.9 | 233 |
| | (potA) (Escherichia coli) | | | | *MG227 | hypothetical protein (GB: D10483_63) (Escherichia coli) | GP: D10483_63 | 35.2 | 304 |
| *MG043 | spermidine/putrescine transport system permease | GP: M64519_2 | 26.5 | 221 | *MG476 | hypothetical protein (GB: D14982_3) (Mycoplasma capricolum) | GP: D14982_3 | 32.0 | 377 |
| | protein (potB) (Escherichia coli) | | | | MG455 | hypothetical protein (GB: D16311_1) (Bacillus subtilis) | GP: D16311_1 | 26.2 | 267 |
| *MG044 | spermidine/putrescine transport system permease | GP: M64519_3 | 29.5 | 252 | MG383 | hypothetical protein (GB: D26185_10) (Bacillus subtilis) | GP: D26185_10 | 25.8 | 221 |
| | protein (potC) (Escherichia coli) | | | | *MG009 | hypothetical protein (GB: D26185_102) (Bacillus subtilis) | GP: D26185_102 | 35.4 | 249 |
| Anions | | | | | MG057 | hypothetical protein (GB: D26185_104) (Bacillus subtilis) | GP: D26185_104 | 28.9 | 175 |
| *MG422 | peripheral membrane protein B (pstB) | GP: L10328_89 | 50.8 | 244 | *MG024 | hypothetical protein (GB: D26185_50) (Bacillus subtilis) | GP: D26185_50 | 51.1 | 363 |
| | (Escherichia coli) | | | | | | | | |
| MG421 | peripheral membrane protein U (Escherichia coli) | GP: L10328_88 | 27.0 | 169 | *MG006 | hypothetical protein (GB: D26185_92) (Bacillus subtilis) | GP: D26185_92 | 41.5 | 178 |
| *MG423 | periplasmic phosphate permease homolog (AG88) | GP: X75297_1 | 30.8 | 254 | *MG056 | hypothetical protein (GB: D26185_99) (Bacillus subtilis) | GP: D26185_99 | 29.3 | 275 |
| | (Mycobacterium tuberculosis) | | | | MG333 | hypothetical protein (GB: D37799_6) (Bacillus subtilis) | GP: D37799_6 | 27.6 | 211 |
| Carbohydrates, organic alcohols, and acids | | | | | MG459 | hypothetical protein (GB: L08897_1) (Mycoplasma gallisepticum) | GP: L08897_1 | 34.1 | 138 |
| *MG192 | ATP-binding protein (msmK) | GP: M77351_7 | 40.5 | 357 | MG218 | hypothetical protein (GB: L09228_16) (Bacillus subtilis) | GP: L09228_16 | 27.1 | 238 |
| | (Streptococcus mutans) | | | | | | | | |
| *MG062 | fructose-permease IIBC component (truA) | SP: P20966 | 42.7 | 416 | MG219 | hypothetical protein (GB: L09228_17) (Bacillus subtilis) | GP: L10228_17 | 34.9 | 174 |
| | (Escherichia coli) | | | | | | | | |
| *MG033 | glycerol uptake facilitator (glpF) | GP: M99611_2 | 35.9 | 189 | *MG273 | hypothetical protein (GB: L10328_61) (Escherichia coli) | GP: L10328_61 | 27.2 | 267 |
| | (Bacillus subtilis) | | | | | | | | |
| MG061 | hexosephosphate transport protein (uhpT) | GP: M89480_4 | 30.9 | 158 | *MG271 | hypothetical protein (GB: L10328_61) (Escherichia coli) | GP: L10328_61 | 27.8 | 250 |
| | (Salmonella typhimurium) | | | | | | | | |
| *MG193 | membrane protein (msmF) (Streptococcus mutans) | GP: M77351_4 | 22.5 | 263 | MG126 | hypothetical protein (GB: L10328_61) (Escherichia coli) | GP: L10328_61 | 31.9 | 252 |
| MG194 | membrane protein (msmG) | GP: M77351_5 | 27.1 | 272 | MG140 | hypothetical protein (GB: L18927_2) (Buchnera aphidicola) | GP: L18927_2 | 28.6 | 68 |
| *MG120 | methylgalactoside permease ATP-binding protein | GP: M59444_2 | 33.2 | 487 | MG152 | hypothetical protein (GB: L18965_6) (Thermophilic bacterial sp.) | GP: L18965_6 | 25.3 | 170 |
| | (mglA) (Escherichia coli) | | | | MG305 | hypothetical protein (GB: L9201_18) (Escherichia coli) | GP: L19201_18 | 23.1 | 328 |
| *MG441 | PEP-dependent HPr protein kinase | GP: M69050_2 | 46.5 | 570 | MG029 | hypothetical protein (GB: L19300_1) (Staphylococcus aureus) | GP: L19300_1 | 27.0 | 109 |
| | phosphoryltransferase (ptsI) | | | | MG425 | hypothetical protein (GB: L22432_4) (Mycoplasma capricolum) | GP: L22432_4 | 25.0 | 94 |
| | (Staphylococcus camosus) | | | | | | | | |
| MG041 | phosphohistidinoprotein-hexose phosphotransferase | GP: L22432_2 | 48.9 | 86 | MG250 | hypothetical protein (GB: M12965_1) (Escherichia coli) | GP: M12965_1 | 33.8 | 64 |
| | (ptsH) (Mycoplasma capricolum) | | | | *MG135 | hypothetical protein (GB: M38777_3) (Escherichia coli) | GP: M38777_3 | 28.6 | 98 |
| *MG071 | phosphotransferase enzyme II, ABC component | SP: P20166 | 43.2 | 620 | *MG358 | hypothetical protein (GB: M65289_3) (Bacillus stearothermophilus) | GP: M65289_3 | 38.0 | 155 |
| | (ptsG) (Bacillus subtilis) | | | | MG211 | hypothetical protein (GB: M84964_1) (Bacillus subtilis) | GP: M84964_1 | 30.7 | 341 |
| MG130 | PTS glucose-specific permease | GP: U12340_1 | 25.5 | 108 | MG124 | hypothetical protein (GB: M91593_1) (Mycoplasma mycoides) | GP: M91593_1 | 24.0 | 249 |
| | (Bacillus stearothermophilus) | | | | | | | | |
| *MG121 | ribose transport system permease protein RBSC | SP: P36948 | 27.5 | 199 | MG245 | hypothetical protein (GB: M91593_1) (Mycoplasma mycoides) | GP: M91593_1 | 27.8 | 130 |
| | (Bacillus subtilis) | | | | | | | | |
| Cations | | | | | MG131 | hypothetical protein (GB: M91593_1) (Myocoplasma mycoides) | GP: M91593_1 | 30.7 | 246 |
| MG073 | cation-transporting ATPase (pacL) | SP: P37278 | 34.4 | 887 | *MG400 | hypothetical protein (GB: U00016_19) (Mycobacterium leprae) | GP: U00016_19 | 30.9 | 106 |
| | (Synechococcus sp) | | | | | | | | |
| Nucleosides, purines and pyrimidines | | | | | *MG129 | hypothetical protein (GB: U00021_19) (Mycobacterium leprae) | GP: U00021_19 | 27.7 | 152 |
| Other | | | | | *MG454 | hypothetical protein (GB: U00021_5) (Mycobacterium leprae) | GP: U00021_5 | 26.9 | 150 |
| *MG301 | ATP-binding protein P29 (Mycoplasma hyorhinis) | SP: P15361 | 32.3 | 227 | *MG339 | hypothetical protein (GB: U00021_5) (Mycobacterium leprae) | GP: U00021_5 | 32.9 | 430 |
| *MG402 | lactococcin transport ATP-binding protein (lcnDR3) | SP: P37608 | 22.3 | 654 | MG364 | hypothetical protein (GB: U11883_2) (Bacillus subtilis) | GP: U11883_2 | 33.3 | 167 |
| | (Laciococcus tactis) | | | | MG230 | hypothetical protein (GB: U14003_71) (Escherichia coli) | GP: U14003_71 | 22.0 | 481 |
| MG332 | Na + ATPase subunit J (ntpJ) (Enterococcus hirae) | GP: D17462_11 | 31.1 | 436 | *MG111 | hypothetical protein (GB: U14003_76) (Escherichia coli) | GP: U14003_76 | 28.6 | 230 |
| MG300 | protein P37 precursor (Mycoplasma hyorhinis) | SP: P15363 | 35.8 | 331 | MG473 | hypothetical protein (GB: X73124_94) (Bacillus subtilis) | GP: X73124_94 | 40.0 | 68 |
| *MG014 | transport ATP-binding protein (msbA) | SP: P27299 | 28.1 | 518 | MG265 | hypothetical protein (GB: Z32651_1) (Mycoplasma pneumoniae) | GP: Z32651_1 | 57.1 | 41 |
| | (Escherichia coli) | | | | | | | | |
| *MG015 | transport ATP-binding protein (msbA) | SP: P27299 | 32.2 | 482 | *MG257 | hypothetical protein (GB: Z33076_2) (Mycoplasma capricolum) | GP: Z33076_2 | 37.7 | 210 |
| | (Escherichia coli) | | | | | | | | |
| *MG418 | transport system permease protein P69 MOTIF | SP: P15362 | 40.0 | 252 | *MG147 | hypothetical protein (SP: P09170) (Escherichia coli) | SP: P09170 | 24.1 | 109 |
| | (Mycoplasma hyorhinis) | | | | *MG128 | hypothetical protein (SP: P19434) (Streptomyces vindochromogenes) | SP: P19434 | 26.0 | 105 |
| MG302 | transport system permease protein P69 | SP: P15362 | 27.9 | 524 | *MG226 | hypothetical protein (SP: P22186) (Escherichia coli) | SP: P22186 | 28.9 | 148 |
| | (Mycoplasma hyorhinis) | | | | | | | | |
| | | | | | *MG382 | hypothetical protein (SP: P23851) (Escherichia coli) | SP: P23851 | 27.0 | 253 |
| Other categories | | | | | *MG214 | hypothetical protein (SP: P23851) (Escherichia coli) | SP: P23851 | 30.5 | 295 |
| Adaptations and atypical conditions | | | | | *MG306 | hypothetical protein (SP: P25745) (Escherichia coli) | SP: P25745 | 34.7 | 123 |
| MG467 | osmotically inducible protein (osmC) | SP: P23929 | 28.4 | 88 | MG444 | hypothetical protein (SP: P27712) (Spiroplasma citri) | SP: P27712 | 28.4 | 231 |
| | (Escherichia coli) | | | | | | | | |
| MG640 | phosphate limitation protein (sphX) | GP: D26161_1 | 30.9 | 271 | *MG252 | hypothetical protein (SP: P31056) (Escherichia coli) | SP: P31058 | 33.0 | 180 |
| | (Synechococcus sp) | | | | | | | | |
| MG482 | SpoOJ regulator MOTIF (Bacillus subtilis) | GP: D26185_55 | 27.5 | 245 | MG116 | hypothetical protein (SP: P31131) (Escherichia coli) | SP: P31131 | 32.6 | 45 |
| *MG285 | spore germination apparatus protein (gerBB) | GP: L16960_2 | 31.2 | 128 | *MG359 | hypothetical protein (SP: P32049) (Escherichia coli) | SP: P32049 | 28.5 | 128 |
| | MOTIF (Bacillus subtilis) | | | | MG480 | hypothetical protein (SP: P32049) (Escherichia coli) | SP: P32049 | 28.5 | 128 |
| MG395 | sporulation protein (outB) MOTIF (Bacillus subtilis) | GP: M15811_1 | 36.4 | 235 | *MG133 | hypothetical protein (SP: P32083) (Mycoplasma hyorhinis) | SP: P32083 | 30.1 | 102 |
| Colicin-related functions | | | | | *MG122 | hypothetical protein (SP: P32720) (Escherichia coli) | SP: P32720 | 30.9 | 132 |
| Drug and analog sensitivity | | | | | MG138 | hypothetical protein (SP: P37747) (Escherichia coli) | SP: P37747 | 34.1 | 363 |
| *MG475 | high level kasgamycin resistance (ksgA) | GP: D26185_105 | 35.6 | 224 | *MG345 | hypothetical protein (SP: P38424) (Bacillus subtilis) | SP: P38424 | 33.9 | 167 |
| | (Bacillus subtilis) | | | | | | | | |

| | | | | | |
|---|---|---|---|---|---|
| Phage-related functions and prophages | *MG136 | hypothetical protein 4 (Trypanosoma brucei) | PIR: E22845 | 30.8 | 302 |
| Radiation sensitivity | *MG286 | sinngent response-like protein (rel) (Streptococcus equisimllis) | GP: X72832_5 | 29.1 | 713 |
| Transposon-related functions | MG338 | U3 protein (Bacillus subtilis) | GP: Z18629_1 | 27.1 | 272 |
| Other | MG278 | $$F protein (Escherichia coli) | GP: U14003_297 | 38.3 | 302 |

[0285] TABLE 7
Summary of gene content in H. influenzae and
M. genitalium sorted by functional category

| Biological role | H. influenzae | M. genitalium |
|---|---|---|
| Amino acid biosynthesis | 68 (6.8%) | 1 (0.3%) |
| Biosynthesis of cofactors | 54 (5.4%) | 3 (0.8%) |
| Cell envelope | 84 (8.3%) | 21 (5.8%) |
| Cellular processes | 53 (5.3%) | 21 (5.8%) |
| Cell division | 16 | 3 |
| Cell killing | 5 | 2 |
| Chaperones | 6 | 7 |
| Detoxification | 3 | 1 |
| Protein secretion | 15 | 7 |
| Transformation | 8 | 1 |
| Central intermediary metabolism | 30 (3%) | 6 (1.7%) |
| Energy metabolism | 112 (10 4%) | 31 (8.5%) |
| Aerobic | 4 | 3 |
| Amino acids and amines | 4 | 0 |
| Anerobic | 24 | 0 |
| ATP-proton force interconversion | 9 | 8 |
| Electron transport | 9 | 0 |
| Entner-Doudoroff | 9 | 0 |
| Fermentation | 8 | 0 |
| Gluconeogenesis | 2 | 0 |
| Glycolysis | 10 | 10 |
| Pentose phosphate pathway | 3 | 2 |
| Pyruvate dehydrogenase | 4 | 4 |
| Sugars | 15 | 4 |
| TCA cycle | 11 | 0 |
| Fatty acid and phospholipid metabolism | 25 (2.5%) | 5 (1.4%) |
| Purines, pyrimidines, nucleosides and | 53 (5 3%) | 20 (5.4%) |
| nucleotides | | |
| 2′ Deoxyribonucleotide metabolism | 8 | 5 |
| Nucleotide and nucleoside | 3 | 1 |
| interconversions | | |
| Purine ribonucleotide biosynthesis | 18 | 3 |
| Pyrimidine ribonucleotide biosynthesis | 5 | 0 |
| Salvage of nucleosides and nucleotides | 13 | 9 |
| Sugar-nucleotide biosynthesis and | 6 | 2 |
| conversions | | |
| Regulatory functions | 64 (6.3%) | 5 (1.4%) |
| Replication | 87 (8.6%) | 32 (8.8%) |
| Degradition of DNA | 8 | 2 |
| DNA replication, restriction, | 76 | 30 |
| modification, recombination and repair | | |
| Transcription | 27 (2.7%) | 12 (3.3%) |
| Degradation of RNA | 10 | 2 |
| RNA synthesis, modification and DNA | 17 | 10 |
| transcription | | |
| Translation | 141 (14%) | 90 (24.7%) |
| Transport and binding proteins | 123 (12 2%) | 34 (9.3%) |
| Amino acids and peptides | 38 | 10 |
| Anions | 8 | 3 |
| Carbohydrates | 30 | 12 |
| Cations | 24 | 1 |
| Other transporters | 22 | 8 |
| Other Categories | 93 (9.2%) | 23 (6.3%) |
| Unassigned role | 736 (43%) | 178 (37%) |
| No database match | 389 | 117 |
| Match hypothetical proteins | 347 | 61 |

What is claimed is:

1. An isolated polynucleotide comprising the nucleotide sequence of any one of the fragments of SEQ ID NO: 1 depicted in Tables 1a, 1c and 2, or a degenerate variant thereof.

2. An isolated polynucleotide complementary to the polynucleotide of claim 1.

3. The isolated polynucleotide of claim 1, wherein said polynucleotide comprises a heterologous nucleic acid sequence.

4. A method for making a recombinant vector comprising inserting the isolated polynucleotide of claim 1 into a vector.

5. A recombinant vector comprising the isolated polynucleotide of claim 1.

6. The recombinant vector of claim 5, wherein said polynucleotide is operably associated with a heterologous regulatory sequence that controls gene expression.

7. A recombinant host cell comprising the isolated polynucleotide of claim 1.

8. The recombinant host cell of claim 7, wherein said polynucleotide is operably associated with a heterologous regulatory sequence that controls gene expression.

9. An isolated polynucleotide comprising a nucleic acid sequence which hybridizes under hybridization conditions comprising hybridization in 5×SSC and 50% formamide at 50° C. and washing in a wash buffer consisting of 0.5× SSC at 65° C., to the complementary strand of any one of the fragments of SEQ ID NO: 1 depicted in Tables 1a, 1c and 2, or a degenerate variant thereof.

10. An isolated polynucleotide complementary to the polynucleotide of claim 9.

11. The isolated polynucleotide of claim 9, wherein said polynucleotide comprises a heterologous nucleic acid sequence.

12. A recombinant vector comprising the isolated polynucleotide of claim 9.

13. A recombinant host cell comprising the isolated polynucleotide of claim 9.

14. An isolated polynucleotide comprising at least 50 contiguous nucleotides of any one of the fragments of SEQ ID NO: 1 depicted in Tables 1a, 1c and 2, or a degenerate variant thereof.

15. The isolated polynucleotide of claim 14, wherein said polynucleotide comprises at least 100 contiguous nucleotides of any one of the fragments of SEQ ID NO: 1 depicted in Tables 1a, 1c and 2, or a degenerate variant thereof.

16. An isolated polynucleotide complementary to the polynucleotide of claim 14.

17. The isolated polynucleotide of claim 14, wherein said polynucleotide comprises a heterologous nucleic acid sequence.

18. A recombinant vector comprising the isolated polynucleotide of claim 14.

19. A recombinant host cell comprising the isolated polynucleotide of claim 14.

The application's sequence listing, which the Patent Office published only in electronic form, follows.

SEQUENCE LISTING (1 sequence)

SEQ ID NO: 1 - DNA, 580073 bp, Mycoplasma genitalium
taagttattatttagttaatacttttaacaatattattaaggtatttaaaaaatactattatagtatttaacatagttaaataccttccttaatactgttaaattatattcaatcaatacatatataatattattaaaatacttgataagtattatttagatattagacaaatactaattttatattgctttaatacttaataaatactacttatgtattaagtaaatattactgtaatactaataacaatattattacaatatgctagaataatattgctagtatcaataattactaatatagtattaggaaaataccataataatatttctacataatactaagttaatactatgtgtagaataataaataatcagattaaaaaaattttatttatctgaaacatatttaatcaattgaactgattattttcagcagtaataattacatatgtacatagtacatatgtaaaatatcattaatttctgttatatataatagtatctattttagagagtattaattattactataattaagcatttatgcttaattataagctttttatgaacaaaattatagacattttagttcttataataaataatagatattaaagaaaataaaaaaatagaaataaatatcataacccttgataacccagaaattaatacttaatcaaaaatgaaaatattaattaataaaagtgaattgaataaaattttgggaaaaaatgaataacgttattatttccaataacaaaataaaaccacatcattcatattttttaatagaggcaaaagaaaaagaaataaacttttatgctaacaatgaatacttttctgtcaaatgtaatttaaataaaaatattgatattcttgaacaaggctccttaattgttaaaggaaaaatttttaacgatcttattaatggcataaaagaagagattattactattcaagaaaaagatcaaacacttttggttaaaacaaaaaaaacaagtattaatttaaacacaattaatgtgaatgaatttccaagaataaggtttaatgaaaaaaacgatttaagtgaatttaatcaattcaaaataaattattcacttttagtaaaaggcattaaaaaaatttttcactcagtttcaaataatcgtgaaatatcttctaaatttaatggagtaaatttcaatggatccaatggaaaagaaatatttttagaagcttctgacacttataaactatctgtttttgagataaagcaagaaacagaaccatttgatttcattttggagagtaatttacttagtttcattaattcttttaatcctgaagaagataaatctattgttttttattacagaaaagataataaagatagctttagtacagaaatgttgatttcaatggataactttatgattagttacacatcggttaatgaaaaatttccagaggtaaactacttttttgaatttgaacctgaaactaaaatagttgttcaaaaaaatgaattaaaagatgcacttcaaagaattcaaactttggctcaaaatgaaagaacttttttatgcgatatgcaaattaacagttctgaattaaaaataagagctattgttaataatatcggaaattctcttgaggaaatttcttgtcttaaatttgaaggttataaacttaatatttcttttaacccaagttctctattagatcacatagagtcttttgaatcaaatgaaataaattttgatttccaaggaaatagtaagtattttttgataacctctaaaagtgaacctgaacttaagcaaatattggttccttcaagataatgaatctttacgatcttttagaactaccaactacagcatcaataaaagaaataaaaattgcttataaaagattagcaaagcgttatcaccctgatgtaaataaattaggttcgcaaacttttgttgaaattaataatgcttattcaatattaagtgatcctaaccaaaaggaaaaatatgattcaatgctgaaagttaatgattttcaaaatcgcatcaaaaatttagatattagtgttagatgacatgaaaatttcatggaagaactcgaacttcgtaagacctgagaatttgattttttttcatctgatgaagatttcttttattctccatttacaaaaaacaaatatgcttcctttttagataaagatgtttctttagctttttttcagctttacagcaagggcaaaatagatcatcaattggaaaaatctttattgaaaagaagagatgtaaaagaagcttgtcaacagaataaaaattttattgaagttataaaagagcaatataactattttggttgaattgaagctaagcgttatttcaatattaatgttgaacttgagctcacacagagagagataagagatagagatgttgttaacctacctttaaaaattaaagttattaataatgattttccaaatcaactctgatatgaaatttataaaaactattcatttcgcttatcttgagatataaaaaatggtgaaattgctgaatttttcaataaaggtaatagagctttaggatgaaaaggtgacttaattgtcagaatgaaagtagttaataaagtaaacaaaagactgcgtattttttcaagcttttttgagaacgataaatctaaattatggttccttgttccaaacgataaacaaagtaatcctaataagggcgtttttaactataaaactcagcactttattgattaaaaaacctttcatttttaatgtgttataattatttgttatgccataaatttagtttgtggcaaaagcttctgtactgtttatttaatggaagaaaataacaaagcaaatatctatgactctagtagcattaaggtccttgaaggacttgaggctgttagaaaacgccctggaatgtacattggttctactggcgaagaaggtttgcatcacatgatctgagagatagtagacaactcaattgatgaagcaatgggaggttttgccagttttgttaagcttacccttgaagataattttgttacccgtgtagaggatgatggaagagggatacctgttgatatccatcctaagactaatcgttctacagttgaaacagtttttacagttctacacgctggcggtaaatttgataacgatagctataaagtgtcaggtggtttacacggtgttggtgcatcagttgttaatgcgcttagttcttcttttaaagtttgagtttttcgtcaaaataaaaagtattttctcagctttagcgatggaggaaaggtaattggagatttggtccaagaaggtaactctgaaaaagagcatggaacaattgttgagtttgttcctgatttctctgtaatggaaaagagtgattacaaacaaactgtaattgtaagcagactccagcaattagcttttttaaacaagggaataagaattgactttgttgataatcgtaaacaaaacccacagtctttttcttgaaaatatgatgggggattggttgaatatatccaccacctaaacaacgaaaaagaaccactttttaatgaagttattgctgatgaaaaaactgaaactgtaaaagctgttaatcgtgatgaaaactacacagtaaaggttgaagttgcttttcaatataacaaaacatacaaccaatcaattttcagtttttgtaacaacattaatactacagaaggtggaacccatgtggaaggttttcgtaatgcacttgttaagatcattaatcgctttgctgttgaaaataaattcctaaaagatagtgatgaaaagattaaccgtgatgatgtttgtgaaggattaactgctattatttccattaaacacccaaacccacaatatgaaggacaaactaaaaagaagttaggtaatactgaggtaagacctttagttaatagtgttgttagtgaaatctttgaacgcttcatgttagaaaacccacaagaagcaaacgctatcatcagaaaaacacttttagctcaagaagcgagaagaagaagtcaagaggctagggagttaactcgtcgtaaatcaccttttgatagtggttcattaccaggtaaattagctgattgtacaaccagagatccttcgattagtgaactttacattgttgagggtgatagtgctggtggcactgctaaaacaggaagagatcgttattttcaagctatcttacccttaagaggaaagattttaaacgttgaaaaatctaactttgaacaaatctttaataatgcagaaatttctgcattagtgatggcaataggctgtgggattaaacctgattttgaacttgaaaaacttagatatagcaagattgtgatcatgacagatgctgatgttgatggtgcacacataagaacacttctcttaactttcttttttcgctttatgtatcctttggttgaacaaggcaatatttttattgctcaacccccactttataaagtgtcatattcccataaggatttatacatgcacactgatgttcaacttgaacagtgaaaaagtcaaaaccctaacgtaaagtttgggttacaaagatataaaggacttggagaaatggatgcattgcagctgtgagaaacaacaatggatcctaaggttagaacattgttaaaagttactgttgaagatgcttctattgctgataaagctttttcactgttgatgggtgatgaagttcccccaagaagagaatttattgaaaaaaatgctcgtagtgttaaaaacattgatatttaatttggttagtataaatggcaaagcaacaagatcaagtagataagattcgtgaaaacttagacaattcaactgtcaaaagtatttcattagcaaatgaacttgagcgttcattcatggaatatgctatgtcagttattgttgctcgtgctttacctgatgctagagatggacttaaaccagttcatcgtcgtgttctttatggtgcttatattggtggcatgcaccatgatcgtccttttaaaaagtctgcgaggattgttggtgatgtaatgagtaaattccaccctcatggtgatatggcaatatatgacaccatgtcaagaatggctcaagacttttcattaagataccttttaattgatggtcatggtaattttggttctatagatggtgatagacctgctgcacaacgttatacagaagcaagattatctaaacttgcagcagaacttttaaaagatattgataaagatacagttgactttattgctaattatgatggtgaggaaaaagaaccaactgttctaccagcagctttccctaacttacttgcaaatggttctagtgggattgcagttggaatgtcaacatctattccttcccataatctctctgaattaattgcgggtttaatcatgttaattgataatcctcaatgcacttttcaagaattattaactgtaattaaaggacctgattttccaacaggagctaacattatctacacaaaaggaattgaaagctactttgaaacaggtaaaggcaatgtagtaattcgttctaaagttgagatagaacaattgcaaacaagaagtgcattagttgtaactgaaattccttacatggttaacaaaactaccttaattgaaaagattgtagaacttgttaaagctgaagagatttcaggaattgctgatatccgtgatgaatcctctcgagaaggaataaggttagtgattgaagtaaaacgcgacactgtacctgaagttttattaaatcaactttttaaatcaacaagattacaagtacgcttccctgttaatatgcttgctttagttaaaggagctcctgtacttctcaacatgaaacaagctttggaagtatatcttgatcatcaaattgatgttcttgttagaaaaacaaagtttgtgcttaataaacaacaagaacgttatcacattttaagcggacttttaattgctgctttaaatattgatgaggttgttgcaattattaaaaaatcagcaaataaccaggaagcaattaatacattaaatacaaagtttaagcttgatgaaattcaagctaaagcagttcttgacatgcgtttaaggagcttaagcgtacttgaagttaacaaacttcaaactgaacaaaaagagttaaaagattcaattgaattttgtaagaaagtgttagctgatcaaaaattacagctaaaaataatcaaagaggaattgcaaaaaatcaatgatcagtttggtgatgaaagaagaagtgaaattctctatgatatctctgaggaaattgatgatgaatcattgataaaagttgagaatgtagtgataactatgtctacaaatggttatctaaaaaggattggagttgatgcttataatcttcaacatcgtggtggagttggggttaaagggctaactacttatgttgatgatagtattagtcaattattggtctgttcaactcactctgacttattattttttactgataagggtaaggtttatagaattagagctcatcaaattccctatggttttagaacaaataaaggtattcccgctgttaacttaatcaaaattgaaaaggatgaaagaatttgttcattgttatctgttaataactatgatgatggttatttctttttctgtactaaaaatggaattgttaaaagaacgagcttgaatgaattcatcaacatcttaagtaatggtaagcgggctatatcttttgatgataatgacactttgtattcagtaattaaaacccacggaaatgatgagatttttattggttctaccaatggatttgttgttcgcttccatgaaaatcaactcagagttctttcaagaacagcaagaggtgtatttggtatcagtttaaataaaggagaatttgttaatggactatcaacttcaagcaacggtagcttacttttatcagtcggtcaaaatggaataggtaaattaacgagcatagataaatatagactcacaaaacgtaatgctaagggagttaaaactctaagggttactgatagaacaggccctgttgttacaacaaccactgtttttggtaatgaggatcttttaatgatttcctctgctggtaaaattgtgcgtaccagtttacaagaactttcagaacaaggtaaaaacacttctggtgttaagttaattagattaaaagataatgaacgtttagaaagagtaactatctttaaagaagagttagaagacaaagaaatgcaactagaagatgttggatccaaacaaattacgcaataactatgatttctttaaaaagaaactgttagaaagaaatgtaaatgagcaattattaaatcagtttattcaaactgataaactaatgcgcaaaaacttgcaacaacttgaacttgctaaccaaaaacaaagcttgttggcaaaacaagttgctaagcaaaaagataataaaaagctattagctgaatcaaaagaacttaagcagaagattgaaaacttaaataatgcttataaagattcacaaaacattagtcaagatttacttctaaattttcctaatattgctcatgaatcagttcctgttggtaaaaatgaatcagcaaacttagaacttcttaaagaagggagaaaaccagtttttgatttcaaacctttaccacatcgagagttatgtgaaaagttaaatttagttgcttttgataaagctactaagattagtggaactaggtttgttgcatatacagataaagcagctaaactacttagagcgataactaatctaatgattgaccttaataaaagcaagtatcaagaatgaaacctgccagttgttattaatgaattaagtttaagatcaaccggacaactacctaagtttaaagatgatgtttttaaactagaaaacacccgttattatctttctccaactttagaggtacaacttatcaatttacatgctaatgaaatttttaatgaagaagatttacctaaatactacactgcaacaggtattaactttcgtcaagaagcgggtagtgctggtaaacaaaccaaaggaactattagattgcatcagtttcaaaaaactgagttagttaagttttgtaaacctgaaaatgctatcaatgaattggaagcaatggttagagatgctgaacaaatcttaaaggcacttaagttaccttttagaaggttattgttatgtactggtgatatgggctttagtgctgaaaaaacatatgatcttgaagtttgaatggcagctagcaatgaatatcgtgaagtttcttcttgttcatcttgtggtgattttcaagcaagaagagctatgattcgttacaaagatattaacaacggtaaaaacagttatgttgctactttaaatggaacagcattatctattgatagaatttttgctgcaattctagaaaattttcaaacaaaagatggcaaaattcttatcccacaagcattaaaaaaataccttgattttgacacaatcaagtaatttatgaataaaggtgtttttgttgttattgaaggagttgatggagcgggcaaaactgctttaattgaaggttttaaaaaactttatccaactaagtttttgaactatcaacttacttatactagagaacctggtggtactttgttagctgaaaaaattcgtcaacttcttttaaatgaaacaatggaacctctaactgaagcttatttgtttgccgcagctagaactgaacatatcagtaagctaattaaaccagcaattgaaaaagaacaactagttatttcagatagatttgttttctctagttttgcataccaaggattaagcaaaaaaataggcattgatacagtaaaacagattaatcatcatgcgttaagaaatatgatgccaaactttacctttattttggattgcaattttaaagaagcattacaaaggatgcaaaagcgtggtaatgataatcttcttgatgaatttattaaaggaaagaatgattttgatacagttcgttcttattatttaagcttagttgataaaaaaaactgtttcttgattaatggtgataataaacaagaacacctagagaaatttattgaattgttaacaagatgcttacaacaacccacgcattactaatcattcaaagaaaaggtagtttcttaaaaccttttcttgataattatcttactagtattgtttgtgaaaacaaaaatggttgcaaaaagtgtataaactgtttggaaattctcaataataaatacaacagcttatattgatttgatcaaattaatcctttcaaaagagaaaatgcccttcagttagcaagaatttttaaccgtgaaagaacaagtgtaaacaataaaaatatttatctaattgaagaaattgaaaaattaagcagtaattctataaatagtttattgagactagttgaagatagtccgataaatagttatggtatttttacaactaaaaatgaaagtttaattctttccacttttttaagtagagtacagaaagtagttttaaaaaaagctagtaaagttccttttaaagtaagcaaaaatgatcaagaaattattacaagtttttttactgtagatgaacaaattgaagcaattgaaaatggaagttttaaccgtttcaaaattatcttagatgcatgtttaaacaaaaaaacaggtacagaacaaatttatcatgcttgacaaatttttagagatttttctaatagtgaaattgctcagttaattactctaataattaataaaactgaaaatatagataaaaaatcaattttgtttaattgtttaaaagttttgccatataatcctccaaaatccactttgtttgctaatttagttagttgatagttatgaaaagcgaaattaatatttttgcactagcaactgcaccttttaatagtgcattacatattattaggttttctggtcctgatgtttatgagattttaaacaagataactaataaaaaaataacaagaaaagggatgcaaattcaacgcacatggatagttgatgaaaacaataagcgaattgatgatgtgctattatttaaatttgtctctccaaattcttatacaggagaagatttaattgaaatttcttgtcatggtaacatgttgatcgttaatgaaatttgcgcacttcttttaaaaaaaggaggtgtttatgccaaacctggtgaatttacccaaaggagttttttaaatggaaaaatgagtttacaacaagctagtgctgtaaataaattgattttatctcctaacttattagttaaagatatagtcttaaataatttagcgggtgaaatggatcaacaattagaacaaatagctcaacaagttaatcaattagtaatgcaaatggaagtaaacattgattatccagaatatcttgatgaacaagtagaactatcaactttaaataataaagttaaattgattattgaaaagcttaaaagaattattgaaaatagtaaacaactcaaaaaacttcacgatccttttaaaattgccattataggcgaaactaatgtaggtaaatcttctttactcaacgctttattaaatcaagataaagcgatagtttcaaatattaaaggtagtacacgcgatgttgttgaaggggatttcaatttaaatggttatttaatcaagatcttagatactgcaggtatccgtaaacataaaagtgggcttgaaaaagcaggaattaaaaaaagctttgaatctataaagcaagctaatttggttatttatcttttagatgcaacacatccaaagaaagatcttgaattaattagtttttttaagaaaaataaaaaggatttttttgttttctataacaaaaaagatttaattacaaataagtttgaaaatagtatttctgcaaagcaaaaagatattaaagaattagttgatttattaactaaatatattaacgagttttataaaaaaatagatcaaaaaatctatctgattgaaaattgacagcaaattttaattgaaaaaattaaagaacaattagaacagtttttaaagcaacaaaaaaaatatttatttttcgatgttttagttacccatctaagagaagctcaacaagatattcttaaactactaggtaaggatgtaggttttgatttagttaatgaaatttttaataatttttgtttaggaaaataatggaatactttgatgcacattgtcatttaaattgtgaacctttactgagtgaaattgaaaaaagcatcgctaatttcaaattaattaatttaaaagcaaatgttgtaggtacagatttggataattctaaaattgctgttgaattagctaaaaaatatcctgatcttttaaaagcaaccataggtatccatccaaatgatgttcatttagttgattttaaaaagacaaaaaaacaacttaatgaactattaataaataacagaaatttcataagttgtattggtgaatatggttttgattatcactacacaacagaatttattgaattgcaaaacaaattctttgagatgcaatttgaaatagctgaaactaataaattggttcacatgcttcatattcgtgatgctcatgaaaaaatttatgaaatattaacaagattaaagccaactcaacctgtgatttttcattgtttcagtcaagatataaatattgctaaaaagctactatcattaaaagatttaaatattgacatcttcttttctatcccagggatagttacttttaagaatgctcaagcattacatgaagctttaaagattattcctagtgaattacttttaagtgaaactgactcaccgtgattaaccccttctccttttcgaggcaaagttaactgacctgaatatgtagttcatactgttagcactgttgctgaaataaaaaaaatagaaattgctgaaatgaagcgaattattgttaaaaatgcaaaaaaattattttgacattaaaagttaaataaagcaatttatttaacaaatggatgttagaactgaaagattaaacgaattgttttttgtttatcataaaaacttaaaaaatcaatctaaatctaaatatagcagagcagttaattacttaaaaaggcgtggattcaatttacaagattttttaaaagttgggggtggtgttggttatttacaaaataaagaatgattaaatttacctttatacagttttgatggtaatttaattggttttctaaacagaaaagttagttataaaaaggaatttttatatacaccttttaataaacctccttcaaagagcgaagcttttgtaggactcagagaattagttattaaagacaatagcatatatcttgttgaaggtgattttgactggttagcttttcgcaaagcaggtatattaaattctcttcctctttgtggtttgactatttcaaatcaacaagttcaatgattaaaacaaaaaaagattaaaaagatttttatctgttttgataatgatttagctggaaagaatggagcaaaaaatttaaaagaatatctaactaagcaaggatttataacaaaagttatagaaattaaagctgccgcaaaagactgaaatgatttgtttttattaaacaactcaaattgatcagcggttttaactaatcaacttcttttttaagaattttttaaatttactaataattgttctgataattattttagtgatatttaaatctggacaaagctgaactaaagctctcgcaccagcagcatcttcaatttcattaacaataaccctattatatctatttaaaaagaagtcaatagcataataaccttcccttaggcgtttagctattttctttatttttcttttagtaaatcactttaatttaaacaaggaaacttcagcaccttgtgaaaagttagctttaaattgattagcattagaaatttttttaataactttaattatttttccaaacaaaatataagcacgatattcaactgtgccaattgataaaaaaggttgaacaattcattctgttgcattttcaatgtttaaatgtttgatctcgtcagcactattaactaaatgtacatcttttccaccgtgtgaattacgtttcttaacgatgacaggaaatgatttgattgtttctttactaagaagagaagaattgacagttagaaatctattttgttttaatcatttatatgtttcgtatttatcgtttgctataaaaacaacattaaaaggattaactaaaaaagtatttatttgattattggtttttaaaaaatctacttttcttgaacgatttaaaatcaattcagcttcattaattttagcttcgaaattaatgtctttattttcaagtaataagacttcagcatttagttttttcttttgtaattccttgattagacttaaagcaaatgtttgatttttttcaaaatcatccttgttgtcataaacaactaatgcttttctgttttttaatttaatttttcccattaatctaaattgcttttaaaagctcaattgcaagattagtatttaaatacattgagcttcttgttaattgcacattaggatttacttcacaaaagatcaatgatctgtcttgatcaaacaaaaaatcaataccgcaataaaaaagttgcattactttactaattttaactgctaaattttcttgttccttattcaaaaaaaagcgttctgcctttgcccctttattgagattagaacgaaaatcactattattagttgtatgtaaagcacctataactttattgttcacaacaataactcttaccgattcacctttagagcaagtaatgtatttttgcacaattgcttgttgattaaaagacattaaagtttttcttaatttttgttcatctaaacacaaaaaaacataatcaccaaaagaaccaaaaacacttttaacaataacaggaaactccatactttgttttatttgattaataaaaacatcgagcattactggatttcactccctgtcaaaattttgaggtcctaaaagtgttttaatctgctttatgaatggatattgtgcaatgatagcgtgactaagtcctttattatctgcattgttaattccaattgaactgttaattacttcaaaaccattgctttctagtcatctagctaaagcaatatttttatccataaaaagaattttgttggatatgaagggtaaatttgcttttgctttagttgtattaatatcaaaactagtaaagaattttagttctatatctaactcttcactagcattttttaaaagttgagtttgatttaatttagagctaattggattaaatgctggattgtaaacaacgtttatttttttcatgcaatattcaaagattttttattattgctaaaactgtaaaagggccaacaccgccaggcgttttagttcatcatctagcttttttttcaatgccttcaggatttatatcaccacaaagtttattttgcttgtttcttgaaacacctatatcaaataaaataactccttttttaaagtttttagcttgaaaaaaatgagattttccaatagcagtaaaaactatatcagcacttttaatcaattcaaatgtatttggagtatctttatcgcatgcttgaactttataaccactagtttttaaaaattcataaataggtttgccaccagttattcccaaacctaccacaacaattttttgattattaaattcaaggttaaatagttcttttagtgttattatagcttcaactatacaaggtttaatttcagccaaatgattagttgttaaaccatcaacatcttttaaaggattaattgcttctagtagtgagtttttatctaagtgtggataaactggcaattgcaaaatgataccagtaacatttacatcatgatttaaactaattattttttctattaactctgcttgagttatttgattagatagtttaattaattcactttttgctcctacagtgttacaagcaataagtttttgtttaataaaactgtctgatgaatcatcatcattagcttgaataatcactaacttacattttgatcaatcaaaattcttgtaagtttctaagattgattgcgcttttagttttccatcaaatgacatcttattttgcctaatataaaacaaaacgtctaacttcttatttatgcaaaggtaagttagacgttggaattctttaatggtggagatgaagggtctcaaaccctcaacctcctgagtgcaaatcaggtgctctatcagttgagctacatccccattattggtggaagtaaatggacttgaaccatcgacctcacccttatcaggggtgtgctctaaccaactgagctatacttccaagcataatcctaagggtatttaactaattattataacaattttaatttaaccaaaatacccctcgaattttaacagtttttataatcaaaacagctaattttatggggcttgttttaaaagaatttaacaataaaataagaacagcattaattctcgctccttttttcactttcgctcagatagtgattgatttaatcattccttcttttttagcaagtgctatttcagttgtgttttcaattgataaattaaaacaggatgagtcaggcggaaagacaatttcagttgattttattggtggggctaatattaattttgctaatgtaagagaagcgcaaatagttttagcaaccacagttattttacttgcattatgtggacttttttttggtctaatatctatttattgtgcaagttatgtttcagcaaacacttcttttctattaagaaaaaagatctttgcaaaattaatgcgaatcacaaccccatcacatgaccattatggttcttctactttattagttagattaacaaatgatgtttatttgatggaggtaattgcttttgattttttaaggctaattattcgtgctccgcttttgtttataggtggattagtgtttgcagtaactacaaatcaagatatgtcaatatctttactaattacttttcctttgattcttttggtaattggtattctaaaccgtaaatctattcctttatttaaagaaaatcaaaaatcagttgataagataaatgaaagagtagaagaagatgtttcaggttataaagtaattcaatcttttaatcttcattcctttacaaataacaaatttaagattgcaaatgaaggatgaaaaaagaatagtacaagttctttatttataaactcacttaacattccatttaccttttttttaagcagtttaactattattattgctctactattagtttttcaattagatagtagtgtttcagttgacccattaccgcaggatgcagctattagacctaatatctttgcttttttccaatataacttttacattgttttagggtttatcttaacctctttaacaatggtgaactttaatcgttctagagttgcactaggcagaattaaagatattttatctcagcctgaaataaaaactattacaaataaagatcaaaaagaattattacctaccttggagtttagaaatatctcttttggtcttggcaataagaacaataacaattttttacaaaatcttagttttaaatttgaagcatataaaacatatggtattgttgggcctacaggctctggaaaatctttaattgctaacattatcggtggtttatatgagcctaatgagggtgaaattctcattggtggggagaaaattcaatctattgacagtttatatctatcagaaatgataggaattgttttccaacaaaacatcctttttaaaggaacaatttcttctaatataaaaattggtattgaaactagaagtgattgaaagaatcaatctgatttacaaaagaatgaagcgatgaaaaacgcagctaaaatagcttgcgctgacacctttattgaaaagttttctgatagttatgatcacaatgttgaacagttaggtaaaaacttatctggtggacaaaaacaaagagttgctattgcaagaactttaattacaaaaccaagaattttagtttttgatgatagtatgagtgctcttgatgctctaactgaaaaaaaagtaagagaaaatattgaaaatgatttaaagctaactaccaaaatcattattagtcaaaacattaattcaattaaacacgcagataaaattttggtaattgataatggcagaattgttggttttgatagtgatcaaaagctaatgaaaaattgttcactttatcaaaagatgaaagaatctcaaaaagatttgggaggtgattttgatgcagttaactagtgtaaaaccaagttcttgaaagattttaaagagattaattacttcaatggaaggaagttgaagttataaattactttatgtttttttgtgtatagttcttggtattttatatggaattgctaaccctatcttattagcacaaggtcttggttttatttttcctattactagtagtaatggtcgtgctgttgactcaatatattcattaatttacccaacaaatttaaatgtattcattaggctcacaattgtgagcgtaactgtttttgtagcttatgcattaatctttgtatttaatgtagcgcaaaactatgtagggattaaactttaccaacaaacatgtgctactttgcgttgaaaggcatatttaaaaatgcagagtatgtcaaccagcttttttgatacgcaaaataatggtgatcttatgagtaggttaactaatgatatgtataacattgataacctattcactcaagctggtggacaagctattcaaagtttgtttaatattttaacaacctcagtattaatatttttattaagcccagttattgcacttatttcactttcaattttagctacattaattactttttcttttgcctttctaaagaaatcaaaaacttcatatagtcaagtacaaaataatttgggtgatatgtctggttatattgaagaggttttaactaatcataaggttgttcatgtcttgaagttgcaagagataatgattaaggattttgatcaatacaacaaatcaatgatcaaaccaactgtaagagggaatacatattcgatctttcttttttcttggtttggttttatatcaaatattacttatctggtttctatatcaattgctactgcttttagtgttaattctattccttcatttggaattagtgttattaactattcattcatgttgtcttacattgcttctttaaggcaaataactttagcattagatcaaatctttaccctttgaaacttagttcaattaggggttgttagtgcagaaagagtatttaaggtattagatcttaatgtagagaaagatactgctactattgacaaattacctgatattaaaggtaatataaggtttgaaaatgtagcatttggttacaataaagataaacctactttaacaggaattaactttagtgttaaacatggagatgtagttgcaatagtaggtcctacaggagctggtaaatcaactattattaatctattgatgaaattctataaaccttttgaaggaaagatttatatggataactttgaaattagtgatgtaactaaaaaagcatgaagagaaaagatttctatagtattacaagattcattcttatttagcggcacaattaaagaaaatattcgtttaggcagacaggatgctactgatgatgagattatcgctgcatgtaaaactgctaatgctcatgatttcatcatgcgtttaccaaaaggatatgacacttatatttccaataaagcagattatctttctgttggtgaaaggcaattattaacaattgccagagcagtaatccgtaatgctccagttttgctcttagatgaagcaactagttcagttgatgtccattcagaaaaattaattcaagaatcaataggaaggttaatgaaaaataaaacttcttttataatttctcatcgtctttcaattattcgtgatgcaacattaataatggttattaatgatggtaaagtacttgaaatgggtaatcatgatcagctgatgaaacaaaatggattttatgcacgtttaaaacaatcttcggttcgttaataaattctaatgactgttgctgaaattaaaaaacttgcattaaataatcaggtatttaatgaagcaaaagcgcttttagaaaaaggtaatgttatttttccaaaaaaattcttaaagcgaaagaagatcattattgaagtattagatggtaaggtttttaaggttcaaattaatttaaaaaccgctgctgcacacttggattgtagttgctctaatgataagcaaaattgcgttcatataattgcagcgcttttgaaatataatgatctaaaaaatcaagataacaaagaatttgaccttaataaagccgataaattagagtgcaaagaagttgaaattctaattgaaaatgttagcttagcaattgttaatggcagctgaaaattaaagataggttttgtaattaatattgataaagttcaaactaatacaactgctttacgtttttattgttgtgataataaagatgtttattttctacatactgaagatgaacacttttcaggattgctttagataaatttaatagtgttgaaagacaaacattattaatttttgatcagctaaataaaacaaagcaaatgcaatatgaaaataacagtttgctttttaatttagatcaattcctaagcctagttaaggaagttaaaaaaccttcattattcttattaaatgaggataaaactgacaatattcttttcttaagaagtcaacataaaatcaatggattaagccacgtttgtggttttttaaataataaggtttttgattttgtatcctacaatgaaaaaactaagcaaattgttttacgcttagcttatcttaataagttcactgattttaaatttccatacaacattaacatctataaacttgcttttggagaaacattatttttccattttttaatccatttaaaaatgaatggttttaaaaacatcttttttcaaagtgatgttgttattgttaaggaaagtgaatatctacctaagatgtttttgactattgaatttaatacacaaaaaaacaagtttataactgatgctttttttaaatataagaataaaaatagcaatactttaacaactgtttacccccatcgctatacttagctcaaaaaactaatacatcaaacttcaaccgtttacttttttatgaacaagcactacaaaggttttatgaagaattatttcaaatagattatttaagaagatttgaaaacattcccattaaagataagaatcaaattgcgctttttaaaactgtttttgatgattacaaaaccattgatttagcagaattgaaacttacaagtaatctcttaaattacaaacagttacatttttcaataagtgatattaaagctttaaaaattgaagatagacaactaaaaattgaatttaaagctggcgggatagatctaaagttaattaaaagtgttttaagtaactactataagggtaatgctatttgtattggtgaagatggttgatatgatttgaacgatgaaaatgctaaagcactaatttcattttggagtcaaattgacttaagaaatgctacttgtgatgctaataacaatttgcttcttgctaaataccacttgtttgaagttgtagatactattagtaaatacactgatgtaactaatttattagatgaaaaaacagccttacaattaaaaatagctagtgaaaatcaatttcatctttcgttagataataaccaaattaataacttacgcaaatatcaaaaagaaggagttaaatggataagggcattagaagataatcagtttggtggaattttagcagatgaaatggggttaggtaaaactgctcaagtgatctttgcaatgctggatagttatcaatcaacaaaatcacttttacctagtttaattatcgttccagcatccttactcttaaattgaaaaagtgagttccaaaagtttgcacctcatgtgaaaatagttactgctaatggcaattttaaagaacgctcgcaggtatatgaatcattaaaaaatcagattttgttaatgagttttaatgtcttaagaagtgatattaaatgaatatctcaaaaaaagttccattatgtagtaattgatgaagcacaaggaatcaaaaatgaaaattctactgtaacaaaagccgctaaaaaaattaaaggtaatttttgcttagcacttaccggtactcctattgaaaatcgtttgcttgatctttgatcttgttttgattttgttttaccaaatttccttggtaataaaaaacagttttcagatcaatttgaaaaagaaaaaaatgatgaaagctttcaaaaattaatgaaaaaaacgagtccttttattttaagaaggactaaaaataaagttttaaaagaactacctaaaaaaattattactgatatctatgttgaacttagtgaagaacatcaaaaactgtatgataaacaaaaaacagatggtttgaaggagattaaagaaagtgatgctaaaaatgctttaaatatccttagtttaatcttgaaattaaggcatatttgtagcttagttaaagacaatgatgttaatgattttgaagataattccaaagctaatgcagctttaaacattatttatgaagcacttgaaaataaacgcaaagttattttgtttactcaatttttagatgtaattgattgttttaagcaaactttaaaaaatcaaaagattgatcacctggtatttgatggtagaaaaactgtgaagaatagaaacactattatccagaagttcaatagtgctaaagaaccttgtgtgatgctagcttctttaaaagctggtggagttggtattaacttaactgctgctgaagttgttattcattttgatgtgtgatgaaacagtgctgttgaaaatcaagcaactgatagagcacatcgtattggtcaaagtaaaactgtacaagtttatagaattattgctaaaaatactattgaagagcgagtttgtcaagttcagaatcagaaacaagaacttgttaaaaaaaccttggttgaggatgtaaatttctttaaatctctttcacatgaagaactcttaaagctttttgaataaagcaagaattataattaacactctaaggatgcaagtgataaatggctgctggtaaaagggattattatgaagttctagggatatctaaaaacgctagttctcaagacataaaaagagcttttagaaagcttgcaatgcaatatcaccccgatcgtcataaagcagaaaatgaaactactcaaaaacaaaatgaggaaaagtttaaagaggttaatgaagcatatgaagttctaagtgatgaagaaaaacgtaagctttatgaccagtttggtcatgaagggttaaatgcttctggttttcatgaagcagggtttaatccttttgacatctttaatagtgtttttggtgagggattttcctttggaatggatggtgattcaccatttgatttcatttttaatcgttctaaaaaacgtcaacaacaaattgttgttccctataaccttgatattgctttagtaattgaaattaacttttttgaaatgactaatggttgcaacaaaaccatcaaatatgaaagaaaagtttcatgtcatagttgtaatggttttggcgctgaaggcggggaaagtggattggatctttgtaaggattgtaatggcaatggttttgttattaaaaaccaacgttctatctttggaaccattcaatcccaagtcttgtgttcaacttgcaatggacaaggaaaacaaattaaagttaagtgcaaaacttgtcgttctaacaaatacactgttaccaatcaaattaaagagattaatattccagcaggaatgtatagtggtgaagctttagttgatgaaagtggtggtaatgaatttaaaggtcactatggaaaattaatcattcaagtgaatgtattggcaagtaagattttcaaacgtagtgataataatgttattgccaatgttttagtagatccaatggttgctatagttggtggggtaattgaactacctactcttgaagggattaaagaatttaatattagaccaggcactaagagtggcgaacagattgttattcctaacggtgggattaaattctcaaagagttttaaaagaaaagctggggacttaatcattattattagttatgcacgtccttgtgaatacactaacttagaattgaaaaaattacgtgagtttatcaaacctaatcaagaggttaaacaatatttaaatactttaaaaaatgaatacaaaacttaatgtaaaaggttatctaaatgttggtgataaccatcaactttattactgaacacaaggaaatcctaatggtaaaccggttttgtatatccatggcggacctggttctggtactgatgaaggatgtttaaagtattttgatcttgaaacaacttggattattttattagatcaaagaggttgtggtaagagtaagactaatgatatcttttatgaaaataacactgataaattagttagtgattttgaaattttacgtcaaaaattaaacattaaaaactgaacactctttggtggtagttggggttctgcacttgctttagtttatgcaattaaacacccacaagtagttgataagatctttttaagagcactttttttagctagagaaaaagactgatctgaagctttaatgggattaggaaaaatgttttatccttatgaacaccaacgctttatggatagtattcctaaagcttatcagaacagttatgaacaaattgttaactactgttatgatcaatttcaaaatggtgatgaatcaaccaaagaaaaacttgctaaagcttgggtggattgagaatcaacattactttcacctattaacaaaattcattcaacagcaacagactttaaattagttgaaaaactagctttattggaatgtcactatgcagttaataaaagttttttggatgaaaacttcattctagataacattagtgttcttaaaaataaaagtatttatttggctcatggtagatttgatctgatctgtcctttatatcaaccattagcattaaaacaagcattccctgaattacaactttatgtaaccaataatgctggtcatagtggtagtgatgctaataatttagcaactataaaacaccttttaaaaacttacctttaatgaagcgttgttatattacaacccctatctactacgcatcaggtaagccacacataggtcatgcttttaccactattttggcggatgtaattaagcgttttaaaatccaaaacggatatgaggcttttttgcttgttggcagtgatgaacatggcaataaaatagaaagtaaagctaaaagtttaaatttagatcctaaaacatttgttgatattaacgctcaagcttttaagttaatgtgaaagacccttaatattagttttgatcactttattagaacaactgatgaaatccataaacaacaagttcaaaaaacatttcaagatttatatgacaaaaaactaatttatcaaagtgaatgaaaaggggcatattgtgttgagtgtgaacaaaattactttacttttaataaacaaacaatgttatgtgaaataggtcataatctcagtcttgtccaagaaccttgctgatttatttctttttcttctactaaaaattgaattgaaacaacgataggaaaaaatcaacttaacattattcctaaatcacgtgcttctgaattaaaaaataactttataaacaatggtttaaacgatttagcattaacaagaaaaaatgttacttgaggaataaaagttccttttgatccaaatcaaacaatctatgtttggtttgatgcattgttttcttatatcaccaatttaggatttagaaatggtgatcctaattttataaagtgatgaaataatgacaataaagaaagagaagttatccatcttatatcacgtgaaatcaccagatttcactgcatctattgaccgatttttctacacttacttgatattaagttaccaacccaatttttatcacatggctggatagttgatggtgaagggagaaagatgtcaaaatctttaaacaacgttatctctccagaacaattaattgatcaatttggtgttgatggtacaagatattgtttattaaaagagatgcgtttagataaagataatcgttgtagtgttagcatcttaaaagagatttataatgctgatcttgccaatagttttggaaaccatgtttcacgtacttttggcatgattaaaaagtatctaaacggcaaattagaataccaaattattactgataatgcacttcaaaaaataatgattttaatagatgaatcaatcgttcaatttgatcattactttaacagttatgaattttatagagcgattaatctacttttaaaaattgtttttgaattaagtaaattaattgatgatttcaaaccatgagaattgtttaaaaatcaggaattctcacttttaaaacaactactttttacttgtgttaggtgtgtgcaggtatgctatgtgttgttaacacctatcttagtaaatactgcttcaaaagtttttcatttatttaatttcgctgatgatgcctgtagaaaagatcaattaagagatgcaactttattaaaaaaaattattatctctaattcaatggaagttttatttaaaagagtagattaagaaaagtagtattagaattttattgatttatgcaattagagtacctcaatcttatttctcaagctaaagttattgcagaaaaacaatttaaagctaaccctttttcttttgaaacaatttgaaaagaagtagttaaacatttcaagatttcaaaacaagatgaaccaagcttaattggtcgtttttatcaagattttcttgaggatcctaactttgtctatttaggtgatagaaaatgaaaacttcgtgattttatgaagtttgatgaatggaacaagatatcacaatctatgtttgttacaaaggagatttttgaagaaggttatgaagatctttccaataaaaaagtagaacctgaggaaggagttggtgatttcattatgggaaatgatggtgatgacaatgaaactggcagtgaaatagtacaaggtttaattaatgattcattcagtgaggaaaatcaatagtagatatgcttgttaactttaaattgatgcttcaaaaagcaaagctaggtaaatatgcaatccctcacattaacatcaataactatgaatgggccaaagctgttttaacagcagcaaatcaagctaatagcccaattattgtttcagtatctgaaggtgctttaaagtacatgtctggttatagtgttgttatcccgcttgttaagggtttaattgaatcactaagtgttaaagtaccagtgacattacatttagatcatggtagttatgatgcatgtatccaagcattacaggctggatttagttcagtaatgtttgatggttcacatttaccatttgaagaaaatttcaataaatctaaaaagttaatagagatagcacaaaaaacaaatgcttctgttgaacttgaagttggtactattggtggagaagaagatggtgttataggacaaggtgagttagctaatgttgatgaatgtaaacaaatcgctagtttaaaaccagatgctttagcagcaggaattggtaatatccatggtatctatcctaagaattgaaaaggattaaactttcctttgattgaaacaatatcaaaaattactaacttacccttagttttacatggtggctctggaatcttagaaaatgatgttaaaaaagcaattagtttagggatttgcaaactaaatattaatactgagtgtcaattagcatttgcacatgaaattagaaaatacattgaatcaaataaagacttggatcttaacaaaaaaggttatgatcctagaaaacttttaaaagaacctactcaagcaattgttgatacttgcttggaaaagattgatttgtgtggttctagaaataaagcatagatgttaagtgcagggatagttggtttacctaatgttggtaagtcaactttatttagtgctattactaatttgcaagttgaaatagcaaactatccttttgcaactatagaacctaatactggcattgttaatgttagtgatgagagattagataaattagctagcttaattaatcctgaaaagatagtttatacaacctttcgttttgttgatatagcaggtcttgttaaaggcgccagtcaaggtcaaggattgggtaatcaattcttagcaaacatccgtgaagtggatttaatttgtcatgttgtaagatgttttcaagataaaaaaattgttcatgttaacaatacaatagatcctgtttttgattttgaaattattgttaatgaactaatccaagctgattttgaattaataacaaacagaatcggcaagcttaaaagaaaagctgaatcaggtgataaaatcgctaaagaagagtttgtattacttgaaattgttttaaatggattaaaacaaggtcaaatgcccattcagactctaagtgaaagtgaattgaaaacaattaaatcacttaatctattaacagctaaacctattctaatagtagccaatgtatctgagaatgacttattaaaccttgataataatgaagctttaaaaaaattgaatgcttttcttgatcaaaaaaagattcccaaggcaatcacagtttgttctttaattgaaaaagaattaagcggtttgaaattagaacaacgtcaatactttttggatgaacttggcttaaaaaattattcaggtttaaaccgagtaattcaagctgcatatcaaactttaaacctttggtctttttttacttttggtaaaaaagaagttagagcatgaacatttaaaaagggttgaaatgctcctcagtgtgctgggcaaattcattctgattttgaaaaaggatttattaaagttgaagtaattagttgagatcaattgtttgcaatgaaatctttacaagaagctaaaaaacaaggtttgataagattggaaggcaaaaattacttaataaaagatggtgatgtttgtaactttaaatttaacgtcacttaaaaattaatctattttcaaaatgagttttttcaacatttattaattaaaaattaatgctttttaaagttgaatcttaattcatttttcaatacttttttaggcttcctattctttaattaaattaatacgcttttctaaaagtaaaagttaagaaaagtacttttattcaaacaaaaacgtttttataattttagagatagttgtgccaagtaagtatttattcaccgttataattccaacatacaattgttgtcaatacataaaaaaggcattagattcattgcttttacagaatgaatattttttaaaaacacaagtactaatagttaacgatggttcactagacaatactaaggaagttgttagtgactatttaataaagtactccaatattagttattttgaaaaaactaatggtaattggggtagtgttattaactatgttaaaaaaaataaattagccttaggtcaatatattactgttttagatagcgatgattattttttaaaagatagttttaaaaaagtggctcgtttctttggccatgacatgatcattggcgctttttattgttatattaatgaaaataaaactcgttttttaaaaccttatttcggtaagactggtgttattaaagaacataccaaattaagaaccccccattcccaacctattgctaaattttacagtaataaacttttctatgaactacatgatcttaaggaaaagttattcttccaggattgtttaatgtatcacgatgctattaacagagttgaaagtgttttttatttgcgagagcctttagcagtttggttttctacaagacctggcaattctacaacaacttcttgagaaaatccaaataaatttaatgcttggtgtgaaattctccaaaaaatgaatttgtatggagctgggatagtaatctacatctatactatgctacctggatttctaaaacaactaaagaaaaaacaactaatactgaatttgaaccataaaccagcttacacttgattacctaaacctttagcgtttatttttggtggtttaatggcatttaaaaccagaaaatacattaaatatcctaagtaatttatggcagaaatgatagaagcaaaaaatcttcgtaatgggcaaaccatcttcggtcctaacaaagagattttattagtactggaaaatacatttaacaaaaccgcaatgcgccagggaattgttaaaactaaagttaaaaacttaagaactggggctattgtttggcttgaatttactggtgacaaattagaacaagtaattattgataagaaaaaaatgaatttcttatacaaagatggtaataactttgtttttatggatcaaaaagactacagtcagattgagattaatgaaaaaaaattagagtgggaaaaaaatttcattactgaagaaattgaagttactgttattacttatcaagatgaaattctaggagttaatttacctgatttagttcctattgaagttgagtttgctgaagatgctattcagggcaatactgctaacatggcaagaaaaaaagcacgccttgtaactggttatgaacttgatgtaccccaatttattaatactggtgataagattgtaattgccactgttgatggcaattaccgtgaaaggtttaacaaataaattaactagaacccaaagacgaattgctgtagtggaatttatcttttctctcctctttttcttacctaaagaagctgaagttattcaagcagattttttagagtatgatactaaagaacgacaactaaatgaatgacaaaaactaattgttaaagcatttagtgaaaatatcttctcttttcaaaagaaaattgaagaacaacaattgaaaaatcaattagaaattcaaactaaatacaataaaatatcaggaaaaaagattgatcttttaactactgcagttgttttatgtgcacttagtgaacaaaaggcacataatactgataaaccacttttaattagtgaggcattgttgattatggatcattattcacaaggtgctgaaaaaaaacaaactcatgctttattagataagctcttgtaatgaaacgtaactgaagacaacactataatgtttttttagctaatctagttttagtatttggctttgctttaaatattttggttgcaaaacaatctttaaataacacaacgccccagttcaggtttttgtttgtaactccttttcttggcgttgtcataggtgctgttctctatttttttgatgttaagtggtttttaattgactatccatacaagaaatttcactttcaaaaaaaatgagcaattgtttatttatcaggggttattgtattttttttaaatgttttaattggagtagttttacttgttgtaatggttaattacattactaaccaaattcttgaaagggaatatgaaagattatttacaaattcattaccttatttatgatcaacaacaggaactagtattgttttaagtcttattagtataggaatgagtaaaactgcacatttttttattgatatagagattttgaaagccaaaaaaggagaacccactgatcctaataaaactgataatagagcagttgttattaatcttgatgagaataaaaagaatgaaaaagaacagtcccctccttctgcagaaatgactagtctttaatttcactaccaaataaccttttatgaacaagctcatttaaagtgttatcttttaaaaaagtgcacacaataactgttgcaaattccaaagcacaaccagcacttcttgctgttattaatttatttgctactgttacttttgctgttgatctgttttcagacataactaaatttgggtttggaaaagaagaatagatctcatctttagtgataataccatgtttaaatagaacattcggtgtgtcacaaatagcaaaaagataaaggttatttactttgaaataattaattgttttaagcagtttttcatctttatctaagtgttttgtagctcctattccaccgggaatataaactgcatcaaattctgataagttaatggtgttgacaatattgttaacttcaacaacaccattactagcagttatcttttttaatgaatggtgataacatgttgtttgtattgttttaatgaaactaaatacaaccattacattagtatattcaacatcattcatctctggatagacaataacaagtatctttttcattttatttagtaccaaataaacggtccccagcatcaccaagaccagggattatgtatctattgtcatttaacttttcatcaattgctgcaagaaatatatcaacatgaggatgcattttttctactttattaattccttcaggtgctgctactatagcaataacactaattttgataggtttatcttctttaatagatttaatagcagttaacaatgtagttccagtagcaagcataggatcaagaataataacatgtgaatcagagatgttttcaggcatctttttatagtatgaaattacactggttgtttgggtttgacgatagattcctaaatgaccaactctgattttatctgaatagcgaacaatagcatcaatcattccaagtccagcacgcataataggtacaagaacaatgtcattttttaatttgtagccctttgttttagcaaagggagtttcaacttcaactgttgctagtggtagctgtttagttgcttcaaaaaagagtaatgaagtgatttgattcaaggccatgcgaaactgggaggttgttgtatttttatcacgcagttttgtcaattcattcaagattaaagcatgttgaactttttttatcacgttagttatctttaaataagtttaaactaaaaattagttgaaaagtttatgatcatcttgatgttcaaattcatcaaacagttgtaattgttccatcgtttcaacgtgttttttagtaattttggttctttttttgaaatcatttaaggaagcaaatggtttttcatttcttgcttctacaattgaagaagctaccgcttctcccattcctggaatagtgatgaaaggcgcaattaaaacaccattatgttcaacaaacatccttgcattagagttttgaatagagatttgttgcaactttatattgcgtgccatcatttctaaataaacttcataacttgttaaaagctccgcttcttttggtttaatcttttttattctgtaaagcttattaagttcatctaaacggtttttaataaattcataccctttttcaaaaccattaatatcatgttcctttagtttgaaacttaataaacaagcatagtaactcaaagggtgataaagcttaaatcaagcaattcttcaagccattaaaacataagctgcagcatgtgccttagggaatagataattaatttttaaacaagcattaatccaatattgttcaacaccacagttttgcatcaggctaacttctttagcatttactttaataccttttcttactttttccatgatttcaaaagcatcttttgcttgcatccctttattaattagataaagcatgatgtcatctctacaagcaattacatctcttaaagttaacctattgcttttaattagtttttgtgcattatctgctcacacgtttttaccatggcttaatcctgaaactctaattaagtcagcaaagtctttaggttttgtctgttctaaaatttttctaacaaatttagtcccaaattcagggataccaaccgctcctgtaacttcatcaacaatgcctggttttaggtttaatggtttgtttgaagaaaacatcgaaattaagttcttatcaaagtgagggatattttggggatttatcttagttagatcagctaagtgctttaacattgttggatcatcttgacctaagatatcaagttttaatatggcatcacctaatgcatcatattcaaaatgggtggtctttcattcactttcaacatcatctgctggaaaaccacagggagtaaattcataaacagaatgatcactaggaaagatcataattccccctggatgttgccctgttgttctcttaattcctataagcttttgtttaaatctttcaatttcagcagtagttgcaagatcaacacgtttaatgatttcaaaatagtttctagcataaccataagcagttttttcagcaactgttgcaattgttcctgccctgaaggtgttattaactccaaataattttctgacataatcatgggctttagcttgatattcgctagaaaaattaagatcgatatcaggaattttatcaccagaaaaacccataaaagtagcaaaaggaatgttatgaccatcacctttgaaacttgctttttcatggcatttaggacaatcacgaatcatcaaatcatatccatcatcaacactgtcactaacttcaaagtaatgacattgttcacaaagataatgagcagctaatggattgatttctgatataccaattaaattagcaattaaagaagagcctatagaaccacgtggacctacaaaataaccatctttaacagattgttctactaatagatgggaaattcaaaagacaattccaaaaccattactaatgattgcatttagttctttttcaattctttccttaataagtttaggtaaatttttaccataccttttttcagcttgttttcaagttttatcaattaatttttggttagaatcttgcatcactggtggataaagcttgtttttagttggtactaattcatttaagtcaagtagcttcactatcttattagtgttttcaacgactaatttataggcaatatcttctcctaaaaaactcattctttttagcatctcatcagtggtgtgaagaaatacttcaggaacggtttgttctttttctttattgttaaagtgtctatgtcatttcccacctaagcccttagcacaaactattgccttataatattcattttcccaaggatggataaagtaagcatcagatgcaacagcaactaatttcttaagttttgttgctgttttgataactagtttgattgcatcattaataagttcttttttcagtccttcacgtagtgtataaccaaggtaagcattgggttgtgaaataagcacaaagtcaactttttcaattgctttttcaagttcattaattggttttgttaatgcagctttaaagatgtcaccctgaacagggttttctgttaataaaaaagattttctaaatttagctaagctgctagctaaaactaatggtctgttagcattatgatctgttaatgcaattgataacatctcatataggttttgaaagccccgttggttttttacataaacgattgctgtgtttgtaaatacccttttcatcagatcaatttgacactttttatttaggttttgatctatctctgttaaggtattaatacccatttcttttaactgctttttaaagtaaaagaaaactttttttaaagcttctgtatcatattcagcacggtgtaatctttcatcatcaaattcaagttttagtttagaacaaatattgcttaaagtatgggatgaaaacaagggattcaatgctcatgataaacataaggtatcaatcagtgggtttgttaatggtttgatgttgtatttttcaaattgagtttgcaaaaagggtaaatcaaaattaataccattatgagctaccataacacaatcatctagataatttcttatcttttctaaaccttgctgttgatcaataccgccttcaagcatctcatcagttattttggtgatttcagtgattgtttttgggataggtttgtcaatttttaaaaagaattgctgatgatctatctcgctgttattcttaattttgcgtgctgaaaactcaataacatcatcatacctaccatgtaatccagtggtttcaatatcaaaaataacaaaggtggcatcacttaacttagtgttatctgggttgtgaacaattttgatgtgatcatcagttaagttgaattccaaaccatagatagcttttaaatcatattttttagccacttcataaaacttgggataaatatggatattatctttatctgtaacagttattgcttttcaacctctttctttagcaaactgtgcatattcttcaatgtcattgataccatcaaaagcagtcattttagtatgaaaaactaactccactcgcttttgttttgataaatctaaccttttatagttattaggtatttcaacaggatttatctctctaacaattccatataagatttgagtattagggtcacgttctacttggatatgggcttttatccaattgccaatagtaattccttcaatctttttttcatcagtataggatcatttcaaaattaacgatccacctaattgaaaatcagttacatagatattaagtgtttttttaccagttaaactttcatgggtttttaattcaaagatttgcccaataatcttgacatcatcgatctgttggttaatcttgtggatagggataaattctgttgcaaatacctttgtttcaaactgcttatcatattgagaaacagttacagcttttacttttaatttagattcatttttatcaataggataaagtgcaatgaagttaaagtttttaaaaccagcattattcatccaaaaaatgaaagatttacttttttgaactaatcattcagttaattctttggtttgacattgtgcttttaattcgtcattttcataactaagaaaattgggattacttaactcttgttcaatgagaattttgtatttcttatcttttgaaaagaaactgtgaaaatagtctttaataatagctatcgttacagaagaaaaactattttttgatttaaagaatggctcattctccttaaaggtaatggtaagtttaaaagattcattatcagctttaaatccctcatttaattcattaaatccttcatataaagcatttcaaatatcaatagttaaagggcgactaatagttattgcaaatagaaaaaccttctcttcaatatatttattaaagtaaattgattcaatcctttcaattaagctgttaagctcattgtggtcaaggatattgttatctatcaaaaaattggagagtgcaagaacctttttatctttttcattctcaagattaaataccataagcgtttattaaaaaaatcaaaataaaagatcgaaatttatcaataattatttttagttttagccactttttcgtaaaaaaaaaaaaaaaaaaagcagtttttgctattttagactaaaagtggttatataccaaaatttaaaccttcttttggttagttcttactaacagttttaaatgttacacaagtttttcaaagtgtgaatttaaaaacttcaaatagttgtttattctgtatctaattaacctttaatctttcaataatgaaaacaattcataaactatttttaggtctttgtttacccgcaacattaggtcctttacttggaattgttgttacaaatactgaccaaagtattaagtttacaagcaaatcaaattcgattaataagaataaccaaaataaagagttggctctacttagagataatttgatgaacgaagcgaaagttgatgaaccactttcctttgaaaaacggtttgaaaactttaaaaataagtatagtgatatacatagcttaaataacagtgttttttcacttcatgacgtttatgacttattaggtggatttaaacaatcattgacaacattttttgatgaagtgattgcccaacaacaaaagatcaaggatgcagataagatctttccaagtactaaagataatccacctaaagaagaaaatcctaatgttttagatacactagctaactaccaaggagcaggatttttccctagtttaggtaaaaatggttttaatttacctgaagcagtgttccaaaatttcactgattttaggattaatgactacaagattaaaaattttaatgttgatcttgttagtgaaaatgacattattaaacatgataaagttcgttatgcttttgaagttaagttcaatattgctttagttttatctattaataagtcaaatgttgattttgactttgatttcattttaaagactgataatttctcagacattgaaaactttaatgaaattttcaacagaaaacctgctttacaatttcgtttttataccaagatcaatgtacataagttaagtttcaatggtagtgattccacttacattgccaatatcttgttacaagatcagttcaacctattagaaattgatttaaataaatctatttatgcattagatcttgaaaatgctaaagaacgctttgataaggaatttgttcaacctctttatcaaaaacgacgtgaagcaaagcttgcttgagaagaagaacagagacgcattgctgaagaacaacgtagacaagaagaggagagagctagaatcttaaaagagttaaaagaaaaagctgagaaagataaaagagttaaagaagcacaaaacaaccttcaaaaagcacttggtaacttagatactttctttaacttctttagcagtggtcaagatagagttttacttggttttgatccaaataaatacaatgtgcaaactcgtgaaggtttgtttaaagcattacaaatttcctattctaacttcaaaacttgaacattctatatctccttgttggggtgaaaagaaggtagtgttaaactgttgaaaaaacctatctgaaatgccttgagagatgataaagcatttcaatatgcttttggtttaggtccaaatacttctgaacaacaacttggtagagtaaccctacctggttatggttatgaaggaattagaatgagtgattggttgaggtgagcattgggttactatactagtttcactttaagtccacctaaaaatgttgaagctaatcttataggtgatgctaatgataaaaaacacatttgaatctcacctcatactttcaaattaaacagagagtatggtgatggtgaaagattcaaaggtaaagcatatcgttttaaactatcaataagttttgaactagaaggtcatttaactgcccactgatgaacaattgcctttagaggtagtattcctggaagctgaagtggtaagttaagagttacccatgagtttgatggtgatgtgccttactatagattacatacaactccaccacaatatcgtttaactgatgatatgaaattattgtttgttccgcacagtatccaaagggtaactgcagttggtaatgaaagcattaatggtcttctcagatcacaaaaccttcataacttggaacgtcaatcatatgaagcgactgctcctattgatttaatatcatatatgctttatgcaattagtgataaaaaaccacctcaaaaataagttttatatcattaacgtttaaataaatattattgctaagattactttaaacttgttagcaaactttaatcattttttagctaaattaaacaaccagttaattagtaaacagttccagaattaaaatcaaatattagttagtttttattttgtattttcaaaattctactcaattaggatgatggtttcttgctgaattgataggaacatttatcctaattatctttggtaatggtgcagttgcccaagttaatttaaagaagatggctacaagtgaaacaaaagccaagtttttaacagttgcacttacttgaggaataggtgttttatttggtgttttaactgctaatgctatctttaagggtagtggtcatttaaaccctgctatatcattattttatgcaattaatggcagtatcaaatcacctactgcattaatatgacctggttttgtaattgggattttagctcaattcttaggtgcaatgatagctcaaacaacacttaactttttattttgaaaacaactatcatcaaccgatccacaaacagttctagcaatgcattgtacaagtcctagtgtatttaacattactaggaattttctaactgaatttattgcaactttaatattgataggtggagttgttgctgctagtcactttcttcataacaacccaaactctgttcctcctggatttatggggctttgattggttgctgggattattattgcttttggtggcgctacaggctccgcaattaatcctgcaagggatttgggaactagaattgtgtttcaattaactccaattaaaaataaggatgcgaattgaaagtacagctgaattccagtaattgctcctttatctgcaggattagttttatcaataattattgggttttcccctgcacctgttctttaaagtttttggttttaacagtaacgtgctttttagttaaaaatgagtggtgcagtttgcatctagcttcataagcttctgcatcaccaattaagacaaggttatcattagtatttttatttactagtctttgggttcgttgtgctaaactaccacaaacattgcaaatagcatcaagtttattaactacatcagctattgctaaaagttggggaatacaaccaaaaggctcagctctaaaatcagtatcaagcccagaaataattacatttgttcctatctcattgagagttgtaacaacttctataatctcatttgaaaagaattgtgcttcatcaatggcaacaatttgatagtttttatcaactaagtgatcatagatctcaaaaggagaattaatagttattgcttgatcatattcaccgttgcgtgatttgacaatattagtttgtctagtatcaattattggtttgaagataacaactgaaattttggctatctttcaccgttttattttgtgaagtaatttctctgtttttccagaaaacattgggccacaaataacttcagttcagccctttttggtttgaaaagatggttgatatttacccatataatttcgaaattataattaatgacacatgaacttcttgcaaaaaccaaggggagttaaagattggtttggtgatgaattagtttattttaattggattgttaaaaaaataagatctttagcatttaattggggttttagtgaagttaaaactccgttgtttgaaaatgcacaactttttcaaagatctaatgctaatgctgatattgttcaaaaagaactataccagttttttgataaatctcaaagagaattagctttaagacctgaagctactacaccaatagtaagacttgcttgtgaaaacaaattaatgcaagaagcaaattttcccttaaagttattttgcattggttcaatgtatcgttatgaacgtccacaaaacaataggtttcgtgaacattggcaatttagttgcgaagtatttggtttttccaacctgtttatctttttagatacacttttgtttgctaactctttgcttgaagcacttggaattactggatatgtgcttaaaattaataatcttgctaactttgaaacacttagtaagtgaaataaagccctaaaagattatttaactccatataaattagaactaactgagctttctcaaaaaagattagaaaaaaatcctttgagaattttagatgacaagatagatcaaaaaaaatcatttgttaaaaatgctcctaaaattactgattttttagatgcaagtgcaaaacaagattcagaattgttaaaaacacaactaaaaaaacacaatattagttttgaatgaacagacaatctagttagaggattggattactatactggatttgtgtttgaatatgtaaaaaatcaagacacaattttagcaggtggagtttatgataacttagttgaagaattaagtagtaatccaactcccgcattaggttttgcttgtggaattgaacggttaattaactgtttagaaattgataaaaaagcatttattttgaatactaaaccaaagcagatgttagtaatttgcttatttgaagaagcgcttgaagaattggtttgactagctaaattatgaagggaatataaccaagtaactatttatcctaaggttattaaagttgataatgggattagattagcaaatcgcttgggttatactttcattggcattgttggaaaaactgattttgacaaaaaagctattacaatcaaaaacttagtatctaaacaacagaccatttacacttgaaatgaacttggagaacgaaatgtgttttaaccaacgaattttaattggctcaatttcaactgaacaactcaataaaacaatagttattattgggtgaattaaacggattaaaaagttaggtgaaattaactttattatcgttggtgataaatcaggaactatccaagtaacttgcaaagataaagaacagattcaacaacttacaagagaagacatagttattgttaaagccaaattacaacgcttagatagtgttagatttgaactgataaatccaactattaaacttttttcaaagtcaaaaactcctcctttaattattgaagatgaaactgatgctttagaagaagttaggttaaaataccgttaccttgatctgagaagacgtttgatgcaaaaacgattgttattgcgtcatcaatttatattagcaattcgtaactgatttaaccagcagggttttattgaaatagaaacacctaccttatccaaatcaactcctgagggagcacaagactttttagttcctgcaagaattagaaaagattgtttttatgctttagttcaaagtccacaaatctataagcagctcttaatgattgcaggagttgaaaaatattttcaaattgcaagggtctatcgtgatgaagatagcagaaaagatcgtcaaccagaacacacacaaattgatttcgagatctctttttgtaaccaaaaaatgattatgaatctagttgaaaaactcttttttagtgttttcttagatgtttttcaaatcaaaataaaaaagacttttcctgtttttaaattttcagaactttttgaaagatttggtagcgataaaccagatttacgttatggttttgaaataaaagatttcacctcgctttttcaagatcatcagaatcagttcactaaattaattgaagcaaaaggcattattggtggtattgaacttactaatattgagttaagtacagacaaaattaaagcattaagaaaaattgctaaggaccatgatgtgagtttagaagttcataataaaaataattcaacattaaaaacttcaattaaatgtgatgaaaaaaacactcttctgttagtagcaaataaatctaaaaagaaggcatgaactgctttaggagcaattagaaatgagttgaaataccacttggatattgtcaaacctaaccaatacagcttttgttgagttgttgatttccctctctatgattttgatgagaaaacaaatcagtgaatatcaaatcacaacatcttttcaaaacctaaacaagaatgaattgataattttgaatcaaataaaaacgaagcattaagcgaacagtttgatcttgttttaaatggttttgaaattggtagtggttcaataagaattaatgatccaattgttcaaaaaagactaatgaattctttgaacattgacccaaataagtttgcttttcttctagaagcttatcaatatggtgctcctgttcatggtggaatgggactaggtattgatcgtttaatgatgattcttaatcaaactgataacatcagagaagtaatcgcttttcctaagaataatcatggtattgaagtccatacaaacgctcctgataaaattgacaaagaggaggttaaatgatggataaaagaactagtgaaatagagtttcacttaaagaatcttttggcttgtgatgcatataaactttcacaccgtttaatgtatccacaagatacacaaaacctttatagtatgttaactgcaagaggtgtttatggtgattttaaggagtttgtttgaaaccatgattttgctaaagagatccttttgaatgtatttaatggttttgtaaacagtgtaattgaagttaaaaaaaacaaattgctagctgcagcattgacagataaattagttagtgtttttaatgatcatgaattggctaatgaattcacacaacacatctgtcatttagctagtttcttagagaaaaataaaaaaatgccgttagttgcaaagatccatgaaagtgatcaatcattaccatttagaactcctttaataactatagaaggagttgaaaatattccaaacaactttgtatggttagttaattactttgaaactgtacttctagaaaacatttggttgtttcaaactgcttctacagttgctaaaagaattaaatctttacttgaaaaatatgctaaagaaaccgcagatgaaacaagttttattaattttcaatgccacgactttagtatgcggggcatgagtagtttgcaaagtgctttgtatgttgctagagcacacttgcaatactttactggaagtgacacgatcttaggtggggataattctcgttcaattttagcttctgaacattcagtgatgtgcgcagatggtagtaaacatgaattgaaaacttttcaacgtttattggaaaagtttaaagataaaaaactttctttagtgattgattcttatgacatgtgaaatgtccttgataacattattccaaggttaaaaaacttaatcttaatgcgtggtgctacgctttatttgcgtgctgattctggtaattatcaaactcttatttgcaatcctaattacaaaaagcaagataaaagtacatgagcaatgatcgattacttagatcatcattttagttcaactataaataaaaaaggttataaggttttaaacaagaaaattggcattatttatggtgatggaatcacctatcaaaagatagaatggatcttaaattgtttaaaaaaccatggttattgttcttcaaacattatttttggagttggtagtagcacttatcaaaatttaaaccgtgatactttaggttttgtatacaaattgactgctattaaaagaaataatagatggataggcgttaaaaaaactcccataactgatctatctaaaagttcaaaaggcggtagatataaaacaaagcgattaattacagtttattaatcaatttctttccattttaaagcacgttcaactgctttatgtcaactgttaattttggtttttcttatgtttgggtccatagtgcttttgaactttttatcaagagtagtgagtttttcaagttgatgaatgtcttttcaaaatccacaagcaagtccagctaaaaaacaaacaccaactgcagtggtttctttatttttagggatagaaacaattacatctgcaatatcagcttgaaactgcattaaatagtttgatttaacaatccccccatcagctttaatgctagtaatcttatagcctagatcacttgccattgcatttaataaatcattagtttgaaaagcaattgactctaagctagcttttactatgtgctctcttttagtgcttgcttcaattcctaagataatacccctagcactagcatctcatcaaggagctccaagtccactgaaagctggtacaaaaactaggttttgttcattttcttttgcaagttctgcataaaaatcactttccttttctgaatagataatttttaatgcatcccttaaccattttatagccgcacccgctacaaacacactaccttccaatgcatatacaggtggatgattttctagttgccatgctactgttgtgagcagattgtgctttgagagtgttggtttatcaccaatgttcatgagtacaaaacatccagtaccataggtattttttaccattccaggttcagtacagagttgaccaaacaaagctgcttgctggtctcctaaaactgctctaattggtacaatacctttagcattactagatcagtgattagtttcaatatcaccaaagtaagcattggaactcagaactttaggtaagattgaaactggtacttcaaataaatcacataactctttggatcactccattttgacaatgtcaaataaaagagttcttgaagcatttgaaacatctgtaacatgcatttttccattagttagttttcagattaatcagctatcaatggtgccaaataacaactttttttgctccattagtttctttgctaaaggaacattttttaagattcaagctatcttagtagcactaaaataggggttaataggtaatccagttttttgttttactttggtttggattaacttatcctcattgaatttttgacatagtgctgcagttctttgatcctgtcaaacgatggcattataaacaggcaaaccattttctttatttcataaaactattgtttctctttgattggtaataccaactgcaatcacttcatgagatttgatttgtgctttatttttagcactttgcatggtagctagttgggctgatcaaatttctagtggatcttgttcaactcaaccactattaggaaaaaaagtgttaaattcgttttgtgctattgctatttggttaagattgtgatcaaaaacaattgatcgacaagaactagtaccttcatctaaggcaataatgtattgtttttttagatccatgataagttgtaattaggatttcaatttatcttcttttttaactttaaattaaggagttcaactgctctcttagcaatagcaggacttgatgttaaaccaggggatttcatgccaccaaggatgataaagttaggattgctttttgctgttctaataacaaagtcatttgtttcaatatcaatagctcttgaacctgcaaaactataaatactattttcaaattgcaatgaaggaaccatttttttaccaatagttttaatttggttaattgaatctaaatctatggaacgagttttgtttttttcaattccctcaactgcattaggtcccacaaggatattaccatctaacatctcagcaacaactactcccttaccatggatagtaggtaccataaaaataattgtgttaatcttaaggttgttttgattttttaaaactagatattgtccttttcttgttgtttgtttaaaattatcaacttgtgtagtttctgctagtcaatctgcataatgaccagctgcatcaattaactttttggttttaaattgtggtgttgtttcattgttaataaaaactaaaaaatcatcatcagaatctatttcaatttttgtaacttttttatttgagtagatggcaacattgttttgtaaactagcaagggctaaacacttggttgcaattaaagggtcaattagtcaactaccttcaacttttaaactagctactacatttggattgataaacggttcttgcaataaagtttgttgttgatctaatatttgaatgttttcaacaggaattgagtttttaattcccctttcttttaacaaatttaattgaagtttttcttcattgttgaaagcaacaattaaagtagcaatttttttccttgggaagattagttttttaaatcaatcctcaattcagatttttctccctaagatgttgtatttggcagttagcttattaggattaggatcaattcctgaatggattacaccactgttagcctgcgaagtttcacaacccaaaaaagcatttttttctaaaagtgcaacttttaatttatattggctgagttcatatgcacaactagtaccgatgacacccccacccacaattaaaacgtcaattgtttgcattaattaatcttctagtatttagttagttattttgcaaaaaaggattagttttatagttgtgatttactttttggtatctctataaaaagtagtatcaaacatttttttatcttttgatttctttttactaaaaataattagctaaaataccgtcatatatgggaaagctattatttggtaagttagtttttaaaaagagcttgtttttactgagtggtatgagcagtttagcagtttttttaactgcatgtggggctaccaaaatatttgattcctctgtacagctattagtgtcagataacttttccacacttgctgataaatcattttcacaaatgtcctatgaaggaatcaggagcttttttaaaaaaagtaagggtgttgatttacctgaagcagatagttcacaattacaagaaggcaatggcttgtgaaaacgtcctggttttacattaagtgatagaattgctacttttaataacatcaaaaatgatggctctgatgttattgttgcaacaggttttaaccaacaagaatcacttcaagcaattacttctgatgacattaggtttcaaagtgataaagaaagcttagctaaaacaggttttatttttgttgatggagctattgaaaaggagtttaataaaagaaatggtgttcctcaatttaagtcaactcctaccaatatctcatcagttgcttttagaagtgatgatggttcttttttaactggagttgctactgcagtttacttaaatcttaaccaagaatatttccttgataaaagtggttggtcaactaatagtagtaataataacgaactaactgtaagtggttttgtaggtattgctctaccttcaacgctttcttttctaaatggttttcgactaggtattgcttattttaatgaagtgatttataaacatttaagcgatgcacaagattcatctgcacaagtgaccacttctaaacaaactgttttaaaacaacttcaagttgcaaatggtgaaaaaaggattaaaaagattaaatggatttcaccaaaacaaggaagtgatggagaaactataaacattcaagatcaccaatcaggttctttttcagatactgaacctagagcaataacaatagctaataatttaattgataaaggagttaatgctatcattcctattgctggaccacaaacgaatttagtggttactcaaattgctagaagacaagcccatactgcagttattggcgttgatagtgcacaggaattgctagatattaatattgatgctccaaataaagataagttaaaaatggggaataaaaagattattcccttctcttctattaaggctttggatgttgctgttgaaagtatcttatcaacattagaaaaaggttccagccaaaatggttatcaaggctttggatataacaacataggtacagtgaaaaacaactctgttggggttagtgaagcaggttatgaatttttaatagatcctgttttttgaaaaaatactagttcaatgcaagctatgtctttatcagcaagtctaaaagctaatgcagcatcttcatcagataataagaaaaaattatcagaagttgctactaagaaaaatgaaaacggttcgacaaaaaatggtagtaatgacatcattgacaaatatgccaaactcttaacaaaatctagttcttcaactagtatgagaaacggtagttcagatagcaatcaacagaattttaaaacaacagataatgatggtgattgaactattgttggtgatgaattaggtaaatataagtctagtgaactgcctatttttacaggtagttcttcatacccaacttttcaaactgaagcacaaaatgttttagatggtggagcgaatgttgcttcaacacaaggctttaaatgaagctttaaacaaatttagaattttgattacttaaagatatgaaaaaatttcaagcagttattaaagacccagtgggaattcacgcacgtcctgcttctatccttgcaagtgaggctagtaagtttaaatctgaacttaaactggtagctccaagtggtgttgaaggtaatattaaatcaattattaacttaatgtctttaggaattagacataatgacaacattactatcaaagcagatggagctgatgaagaagaagctttagcagctattaaagcttgtcttgaaaaaaataaagttatctaacttagcatattttaatcaattaaatctgtttattttttaatagtaaaaacacaatttaaccttgtttctatttaacaaaattggtttgaaaaaggctatcaattttgctgtaaaaaattaagatattttttatcaaaaattagcataaaaaattgttatactaattaacgttttttattgaaaattaagtatttaaattgaacgaacattctttaattgaaattgaaggtttgaacaagacctttgatgatggttatgtttctataagagacattagcctaaatattaaaaaaggcgaatttattactattttaggcccttctggttgtggtaaaactaccctgttgaggttattagctggatttgaagatcctacttatggcaagatcaaagttaatggtattgacattaaagacatggcaatccataagcgtccttttgcgacagtttttcaagactatgctttattttcccatctaactgtttataaaaacattgcttatggtctgaaggtaatgtgaacaaagttagatgaaattccaaaacttgtaagtgattatcaaaagcaacttgctcttaagcatttaaagctagaaagaaaaatagagcagttacaaaaaaacaattctaatgctcaaagaataaagaaattaaaggaaaaattacaaaaacttttagaaattaacaaacaaaaagttattgagtttgaaaataaagaaaaactacgtagagaagatatttacaagaatttagagcaattaacaaaagaatgggatctactttctcaaaagaaactaaaagaagttgaacaacaaaaacaagcaattgataaaagttttgaaaaagtagagaataaatacaaaaaagatccttggttttttcaacacagtgaaatacgtttaaaacaatatcagaagaaaaaaactgagttgaaagctgatattaaagcaacaaagaacaaagaacaaatccaaaaattaactaaagaacttcaaaccttaaaacaaaaatacgctaataaaaaagcaattgacaaagagtatgacaaattagttgtagcttacaataagaaagactattgaacttcttattgagaaacatacacacttcaacaaaaagaagcttttgaaaaacgttatctttcaagaaaactaactaaagctgaacaaaataaaaaagttagtgatgttattgaaatggttggtttaaaaggtaaagaagatcgtttgcctgatgaattatcagggggaatgaaacaaagagttgctttagcacgttctttagtagtagaacctgaaattcttttattagatgaaccattatctgcacttgatgcaaaggttagaaagaatttacaaaaagaattacaacagattcataaaaaaagtggattgacttttatcttagtaactcatgatcaagaagaggctttagttttatcagatcggatagtggttatgaatgagggaaacatcttacaagttggtaatcctgttgatatttatgactctcctaagactgaatgaattgctaatttcattggtcaagctaacatctttaaaggtacttatttaggagaaaaaaagattcagttacagagtggtgaaatcattcaaactgatgttgataataactatgttgtaggtaagcaatataagatcttaattcgtcctgaagactttgatcttgttcctgaaaataaaggtttttttaatgttcgtgttattgataaaaactacaaaggattgctttgaaagataaccacacaattaaaagataacactattgttgatttggagagtgttaatgaagttgatgtaaataagacctttggtgttttatttgatcctatagatgttcatttaatggaagtttaacaagatgcacattaagaaaaaatactgacttctgctccccttctttttattaatgacaatcttctttattattccaatggcatggattattgttagtggattacaaagtgaagatggggctagtattagtcaaaaatatgaaccacttgttagtggcttaggtttttttaacagtttctgaaccagtttgtggatctcaatagtgactgtaattgttgcattgttgttttcttttcctttttgttactttctctcccaatcaaaaaacaaaatttttaaagcgtttgttatttcaattgcaacagttcctatttgaagtagttttcttattaagttaattggattgaaaaccctacttgatttattaattggactttctttaaacagagttggtgataacaacttaacttttggttcaggatataccttacttggaacaatttatctgtttactccttttatgtttttaccactttataaccacttctgtgttttacctaaaaacttgttgttagctagtcaagatttgggttataactggatttacagctttgtgaaagtagtaattcctttttctaaaaccgcaatgttatcaggaattgctttaacttttttccctgctttaacttcagttgcaattgctcagtttttagataactctaaccaagccgaaacccttggtaactacatatttaccttgggtaataatggttatgatagtgcaattgaaagaggcagagctgctggagcaattattattgctgctttaattacttttgcaatttactttactgttgtttttttgcctaaaattgtccgtattgttcataacaaatgaaaacaacatgaaaaagcattttaagaatttaattaaaaacagttatttctttctgttaataactttaatctatttaccacttttaatagttgtacttgttagtttaaacggttcttcttcaagaggaaatatagtgcttgattttggtaatgttttaaatcctaatcctgattctaaatctgcttatttaagattaggtgaaactgattttgcaacaccactaataaattcaatcattataggtgtgatcactgttttagtgtctgttcctattgctgttatcagtgcgtttgcgcttttaagaacaaggaatgctttaaaaaagacaatctttggaattactaatttttctttagcaactcctgatattattactgctatctctttagtgttgttatttgctaacacttgattaagttttaaccagcagttaggtttttttaccattattacttcccatatctctttttcagtgccttatgcattgattttgatttaccctaaaattcaaaaattgaatcctaatttaattcttgcttctcaagatttaggctattcgcctttaaaaacttttttccatattactctaccttatctaatgccaagtattttttcagcagtactagtagtatttgcaactagttttgatgattatgtaattacctctttagtacaaggatcagtaaaaactatagcaactgaactctattcatttagaaaaggaattaaagcatgggcaatcgcctttgggtctattctcatattgattagtgtcttaggagtctgtttaataaccctgcaaaagtatttaagggaaaaaagaaaggaaataatcaaaataagacaatgaaaaaacagttaaaatattgctttttctcactttttgttagtctctcatcaatattgagtagttgtggttcaacaacatttgtactagctaactttgaatcttatatttcgcccttattgctagaaagagtacaagaaaaacatcccttaactttcttgacttatcctagtaatgaaaaactaattaatggttttgctaacaacacttattcagtagcagtagcatctacttatgcagttagtgaattgatagaaagggatctattatcaccaatagattgaagtcagtttaatctgaaaaaaagtagtagttcaagtgataaagtaaataatgccagtgatgcaaaggatttgtttattgattcaattaaagagatcagtcaacaaaccaaagatagtaaaaacaatgaattactgcattgagcagttccttattttcttcaaaacttagtgtttgtttatcgtggtgaaaaaattagtgaacttgaacaggaaaatgtttcatgaactgatgtaattaaagcaattgtgaaacacaaagatcgctttaatgacaataggttagttttcattgatgatgctagaacgatcttttcacttgctaacatcgttaatactaacaacaattcagctgatgttaatccaaaggaagatggaattggttatttcactaatgtctatgaaagctttcaaagacttggattaacaaaatctaatttagatagtatctttgttaattctgattccaatattgtgatcaatgaattggcaagtggtagaagacaaggaggaattgtttacaatggtgatgcagtgtatgctgcattgggcggtgatttacgtgatgaattgagtgaagaacagattcctgatgggaacaactttcacattgtgcaacccaaaatttccccagttgctttagatcttttggttatcaataaacaacaatctaattttcaaaaagaagcacatgagatcatttttgatcttgctttggatggtgctgatcaaactaaagaacagttaattaaaactgatgaagaattgggtactgatgatgaagacttttacttaaaaggagcgatgcaaaactttagttatgtgaactatgtttcaccattaaaagtaatatctgatccaagtactggaatagtcagttccaaaaagaataatgctgaaatgaaaagtaaacaaatgtcaactgatcaaatgactagtgaaaaagaatttgattattacactgaaacacttaaagcattattagagaaagaagatagtgcagaattaaatgaaaatgaaaaaaaactagttgaaaccattaagaaagcttacactattgaaaaagatagttcaattcggtgaaaccaattggtcgaaaaaccaatttctcccttacaacgtagtaatttatcgttatcttgattagactttaaattacactggtgataatatggaacaaccgttgtgtgttttagggattgaaacaacctgtgatgatacaggtcttagtattgtcattgatcaaaaaatcaagagtaacattgttatctcttctgctaacttacatgtaaaaacaggaggagttgtacctgaaattgcagcacgatgccacgaacaaaatctctttaaagcaataagagatttaaattttgagataagagatttatctcacattgcttatgcatgtaatcctgggttagcaggatgtttacatgtgggagccacttttgctagaagcttaagtttcttattagacaaaccattgttacccatcaaccatctttatgcgcatatcttttcttgtttaattgatcaagatttaaataagctgcaattaccagcattaggccttgtaatttcaggtggacatactgccatttatctagttaaatcattttatgaacttgaactaattgctgaaactagtgatgatgcaattggtgaagtttatgacaagataggcagagcaatgggctttgattatcctgctggtagtaaaattgatagtctttttaataaagaattagttaaacctcactatttctttaaaccttctactaagtgaactaagttttcctattctggtttaaaatctcagtgtttaaacaagattaaacaaataagtgctaataaaacccgaattgattggagtgaattagcatccaattttcaagctactattattgatcattacattgatcatgttaaaaatgcaattaaaaaatttgcccctaaaatgttgttagtaggaggtggagttagtgccaattcttatctatctaacagaattagtacattaaatttaccctttttaattgctgatagcaaatacaccagtgataatggagcaatgattggtttttatgcatcacttttaattaatggcgataagaattaaaagtacaagagttggtagatttgtttctgaatcagtgggattaggtcatcctgataaaatttgtgatcagattgcagatagtatcttagaccaatgtttactacagagtaaaactagtcatgtagcatgtgaagtctttgcttctaaaaaccttattttaataggtggtgagatttcaacaagtggctatgttgatgttgttcaaactgcttgaagaattttaagaaatttaggttacaacgagactgatttcagttttttaagctgtatcaacaaccaatcactagaaattaatcaagcagttttaaaaaataatgagattaatgcaggagatcaaggcattactgttggttatgcagtgaatgaaacaaagcaactaatgcctttaggagttttactagcacactcgtttttaaaacaagcagaaaaactaacaaaacaatttgattttttaaaaaatgatatgaaaagtcaagtggttttaaactacagtttaaaccaagttgaatgtgaagaagttttactatcaattcaacacactaatgctattagtttaacagaattgagaaaagtgattgaaaataatgtaattctacctgttttaaaccaatatggttttcaagataaaaagccaacttgtttagtgaatcctggtggttcttttgttttaggtggacctatggcagatactggactaactggtagaaaaatcattgttgacacctatggtccatatgctcaccatggtggtggtagctttagtggcaaagatcctagtaaggtggatagaacaggtgcttattttgcacgttttatcgcaaaacatattgtaagtttaggctgggccagtgagtgtgaagtcagtattagctgagtcttttcaaaacccaatccacaatctattactgttaagtgttttaacactaacatacagtatgatgaagtgttaattaatagagttgtaaataactatttcaactgatcgattactaaaattattgacaagctaaaattacttgattttgttaagtattctgattatgcagtttatggacattttggtaatgatctttcaccatgagaacagcccactgaattggataaattagaatgcttaatcaaaaatttccattagatcctaataaaaaaaaggaacaacaaggcgtagtaaaaccaaatctaccggttgttaaagaaaagaaaaaacagccatttaaaaaaccaaattggagtgaatttaagctgttcaacttttttaaaaagcacacttatttttgcttggttgtattagcttttcttatcttgattattttacttagcagcttatttgctattccacttagccaaataccttcaagtactgtttaaaagaattgtccaaatccaccaaacgggttactacctgtttttaatagtttacccatttctgttgcttttagttgcatcttatttcattccttcatcagtttgtttaactcatccatttttctccctgaaccttttatgatgcgctgttttctattaggatcacgattaattaatttgggatgtctcctttcttctctagtcatagagttaattaaaacctttcatagttcaattttgttttcaattaattcagcattttcttctgatacagaaaagttagcaggcaacatttttatcagtgaactgacacttcccattttgtgcatttgttgcatgtagatcaaaagatcttctaaatccatttttcccaaaaacatcttgctgatggttttagttaaatcttttttatcaaaaacttgttcagctttttcaactaaactcattacatcacccaaacctaagatccgattggctatcctttcaggatgaaattgttccaatccatctaatttttcagaaacaccaattaatttaatgggtacttgtaaaagtgaagctaatgaaagtgcagctcctgctctagcatcactgtctaatttactgataataaatccagttagttttaaacgtttgtggaacgtttgagcaacattgataatttcctgaccgcttaatccatctactaccatgataatttcatcaggatttaattcatttttaacacttaccaattcatccattaatgtttcatttgtttgtaatctaccagcggtatcacaaatgattgtttgacattttgcagttttaaaagcactgagtgctgcttttgttgttttagcaactggttgagtgccttgtgcaaaaaatacgctgttagtttgttgtgaaagcgtttcaagttgttcaatggcagcgggtctgtagatgtccaagcctactaacattgttttttgcttgtatttcttttcaagtcaataagctagtttgccacaagttgttgttttacctgatccttgtaaaccaaccatcattatttttaaaggtcttttttcatttagttcttggttgggttggcttaagatattaattagttctgttttgattgtttttaatagagacttttgcaaatcttgaccaggttcaatggtttgtcctactgttttatctctaattgctttgatgaaatttttaacaacaagcaggttaacatcagcatcaagcaatgcaattctaatctcttttagaactaactctacatctttctcagtgatcgtttgagcgttaatttttttttgcatcgtgcgcataacgatgcttgataacattgctttgaacatgatttttaattatttattattaaataatgttttaataaaacaatattgcaatatgaccccacatataagtgctaagaaagatgacattagcaaagttgttttaatgccaggtgatccattgagagctaaatggatagctgagcaattcttagatcaagctaaattagtcaatgaagtgaggggaatgtttgcttatactgggcagtataaatctaaaacagttacagtaatgggccatggaatggggatcccttctattggaatttattcatatgagttgatgaatttttatgaggttgaaactatcattagaatcggaagttgtggtgctttagcaccgcaattaaaattaaaagatcttgttattgcttcaaaagcatgaagtgagtctatttatgctaaagacatgggtgttgaaattccagaagataagatcttatttgcaacaagttctttagtggaattagcaaaagaaactgcgattaagaacaagcttgattttcatgaaggattagtattttgtgaggatgctttttatcaaactagaaaagatgtaattagtcttgctaaagaaaaaaatagtttagcagttgaaatggaagcacatgcactttatgctaatgcaatcctgttgaagaaaaaagcacttacactcttaacagtatctgattctctagtaactcatgaagcacttagttctgaattaagacaaaagtcatttaagcaaatggctttattagcacttgaaatgactcaaaaactaatctaatctatgaaattagaatacaaccggattattgatagcaccttagtcaaagctgatacgcttccccatgaaatagatactttatgtgctgatgctcataaataccagttttttgcagtgtgtgttaatcctagttatgttagttatgctaaaaacatcttgaaaaatactgcagttcaactctgttgtgttgttggtttccccttaggacaaacaacccaaaaacagaaggtatatgaagctaagattgctattaaagagggagcggatgaaattgatatggtaatgaatattgctgagtttaaaaaacgttgtgcttgtgttattactgaaattagagctgttaaaaaagtgtgtggcaagcgtaaattaaaagtaattattgaaactgcacttttaacaaatgatgaaatcaaagatgcagttaatgtttgcattgatggcaatgcagattatgttaaaacttccactggtttttctttccgtggtgcatctttagaagatgttcagattatgaataatgctgcagcaaatttaattaaaatcaaagcttcaggtgggattaaaacagcaaagcaatttatagatttatttcaagctggagctagtagaattggaacttcaaatgcggtccaaataatgcaagaattaaaaaaaatgaaccatgaatatcattaatttaattaataaaaaacaacgcggaaaagctttaaatttagctgaaatcaattggtttgttaatgctgttttaaacaaaaccattgctgattatcaaattactgcatttttgatggctatttggtttaaagggatgaacccaaatgaactttttttattaacaaaagcaatggtggatactggtgaaattattaagtttaatcaccatggcaagattagtgttgataaacattcaactggtggtattggtgataaggtttctttagcattggttcctatcttaactagtttaggatttagtgttgctaaattatcaggaagaggccttggttatactggtggaacaattgataaattagaagcagttggagttaaaacagaattaactgaccaacaagcacaagcatgtttagataaaaatgattgttttatcatcggacaaagtaaggacatcgcaccagttgataaagtactttatggtttaagagatattactggaacagttgatagtttgcctttaattgcatctagtattatgtctaaaaagctagcagttatgaacgagtatattttcattgatcttaaatatggaaaaggtgccttttgtaaaactaagaaaattgctaacgaacttgcaaaactgatgcaaagtattgctaaaagttttaaaagaaagctgtctgttaaattaagtgatatgaatcaagtacttggtaaagctgttggcaatgtaattgaagttaatgaagctgttaactttctaaaacaagatttagatcaagtaggacaagattttattgatttaatgcaaacaattgttattaacattctacttgaaacaaaacaagcaaaaaccaaacaaaaggctattgaactttatcaggatgttttaactagtaaaaaagcatgaaatcgctttttatcttttattgaatctcaaggaggaaatgttgaattatttactcaaaaagaaggtttttttaaacctaagtataaggcatctataaaagctgaaaaaagtggtatactacattttactgatccaattgatttagctaaaattgggattaatctaggggcaggtaggatgaagaaaacagatcaaattgatccaatggcagggttatttttaatgaaaaaagataatgagtctgtggcagttggagacactgtattaaacctgtatagttctagtcctattagcaatgaatatatctctgctgctcaaaaaacaataattattaataaataaaaattcctatgaaggtgaatttagagtggataattaaacagttacaaatgatagttaaaagagcatatactcccttttctaactttaaagttgcatgtatgattattgctaacaaccaaactttttttggagttaacattgaaaattcttcctttccagtaactttgtgtgctgaaagaagcgccattgctagcatggttacaagtggtcataggaaaattgattatgtttttgtttacttcaatactaaaaataagagtaactcaccctgtggaatgtgcagacaaaacttactggaattttcccatcaaaaaacaaagcttttttgtattgataatgatagtagttataaacaattttccattgatgaattattaatgaatggttttaaaaagagctaatggataaacttagattagaagttgaaagatggttaaatcatcctaatgttaattgggagttaaaacaacaaattaaggagttgaatgaatcagaaattcaagaactttttagtttggaaaaacctttatttggcactgcaggtgtaagaaacaaaatggcaccaggttatcatggtatgaatgttttttcttatgcctatttgacccaaggttatgttaagtacattgaatccatcaatgaaccaaagcgtcaactacggtttttagtagcacgtgatacaagaaaaaatggtggtttatttttagaaacggtttgtgatgtaattacatctatgggtcatttggcttatgtgtttgatgataaccagccagtttcaacacctctagtgtcccatgtcatttttaaatatggttttagtggaggtattaatatcacagctagccataaccctaaagatgataatggttttaaggtttatgatcatactggtgcacagcttttagacacacaaacaaaccaattgttaagtgatttaccttgtgttacatctatgctagatttggaattacaaccaaatccaaagtttgtccatactcttgacaatgaaaaggtttataaaaactatttcagagagttgaaaaaggtgttggttattaacaacaacaatttcaaagacattaaggtagtttttagtgggcttaatgggacttcagtttgcttaatgcaacgctttttaaagtaccttggttatagcaatattatcagtgttgaggaacaaaattggtttgatgagaattttgaaaatgctcctaacttaaatccagagtataaagatacatggatattagcacaaaaatatgctaagaaaaataatgctaagttaattattatggcagaccctgatgctgatagatttgcaattgcagagttaaataataatcaatgacattatttttcaggtaatgaaacaggagcaattactgcttactataaacttaatcataaggtttttaaatcaccttacattgtctcaacttttgtctcaacttatttggtaaataagattgctaaaagatatggcgcttttgtgcatagaaccaatgttggttttaagtacattggtcaagcaattaatgagttatcacaaacaaacgaattagttgttggttttgaagaggcaattggtttaataactagtgataaattaaaccgcgagaaagatgcttatcaagctgctgcattattgcttgagattgctagacattgcaaagaacaaaacatcacgcttttagatttttataaaagaattctttctgagtttggtgaatatttcaatttaacaatatctcatccctttaaagctactgctactgattgaaaagaagagattaaagctttatttaatcaacttataaatgctaatttaactgaagtggctggttttaaagtagttaaagtccatcttgataaacaaacaaatatcttagagtttggttttgaaaatggctgggttaaattccgcttttcaggtactgaacctaaattgaaattttactttgacctaactaatggcactagagaggctctagaaaagcaagctaagaaaatttataaattctttgtaaatttactcaaactcaacaaagcttaaattttctaaaggtaagttaattaattgggttttagatgttaattctatctctacaactgctttgttaactgtaccttgataaagtgcttttatctgtccttgaacatgaatagtatcagttaaatgtacctctactaaattaccaacactaaattcaaagagttgttcaactttattgtcagtatcaagaatttcatatttgcccaaaaaaggaactaatactgatggatcaagtttggtttgctcactttgaataatcgttgctttttctttccattcatcttgttcttgactattttgtagttttttaaaagcttcttttagtttttcagcatcaacaatttctgaatcttcatcctcttttggtttttgaatggcttgtttttgttttaagatatattgaaatttttcatcaaatttatcactgtccatttcaataatggcagtatttgttagcataattcgtttgctaggattgattgatatccctttaagcatttgttctaaattattagcatctttttcatctaaagggataggtaaagcacccctgccagaagaacctactatgccagtgatcccagggaagttacgaacaattcttcaagcatcttcactataaatcatctttatgtagatgtatctaccaaggagatttttttcactaatttttaccctaagataacggtaatcatcaagaacaaaccatttgttaaaagtagtgttctttaaggaacgaggaagttttcctgattttaatgaataaacttcttcatgaacttccctttcttttagaactttaacatcaacaatctcatgattaaatcctaaagcttgaattttagcttttagattttttacaacagcttcatctttaatactaacaggagctacataccactttggtgttaattcactagcttgcataaattaatttttaaatattcccaacgtaattaacaattgattgataccaaaaaagattcctaccatcagtccactaactagcaaaattaaaagaaaaattatgataagttgtctaccttttactcaaacaattttgttgatctctttatcaactccaaatcataaattaacaattcgttttttaaaaggaagcttgggtttcttttcctttgctaaactttcatgcttttctttttctttagttctttccttatctttacttttcttggcttctgttctaagtttgagctgtttatgtaactcatgaattgaagcatcatcataagcagttagcttttccttctttttaaagctaaaaggcagttttttttccatggctttttaaaaagaatctagatgcttagttttttgattgcactgcttgcagtacttgttgatgataagtcgctgcaaaggttgttttgttcaccgttttacatagttacgacttaaacagtcttgacagacaaaaataatctttttgcgcaacttcagtagcaaattataaattatctgcttgttttactaatttaatcttttgatagcaatagagctgtaaaaggccaaagggtaaaaaacaagatcagtgtagaatttttttgaatttaggttcaatattttcacatgcagtattaattgtttttcaaatcattatgctgataactaactggatgatcataaaacagatagcaaaaactcctaaaacaattaaaactgctcgtaaattaaaaaaaataggatcacttctaattgcacttaaactagcttttctaattaaatcaaagatgataccaatccctactaaagagataatacaaactaaaaaaaagatactaattaacaaaagaatctcattaaggttatggagttttttaaatactttcatggaaaagtgtatagagcatacttgattttaaatgcatttttttagctaaataattgcatgcatcttttaacttaacaccaatatccattaacttctttatttcatatactaagtattgattggaagataatgtttggtgattaatattttgattatcaataacaattacaaattctccttttaaagtgatgtcaggtaaagtgttttcactggtgttaaatcaataatgtgattcatgtaacttagttaattctcttcctataaaaacgtcattgtttttaaaaacatttttcacagtttctaaagtattttctaacctatgcactgcttcaaaaaaaacgatagtgcttttctgattttgataggtacttaaataatttttgagctgattttgtttgtgacttaaaaaacctaaaaacaaaagtggtgttgttttaaaaccactagtgatcaatccacacattaatgcactaggaccattaataacttcgattcttatctccttattttttgatatgatccaattaatcatttcattaccaggatcagataaactaggataacctgcatcactaacaagacaacacttaaagttagttataaattcctcagcaaaagttaaattctgtttttctttaaaactgttgttaataacaaactttttttgcttgcaatcaatgttgagtaaatccagcatttttcttgttactctactatcttcacagaataacacttcacaatcttgtaacgcttttttagctctttcacttatctcttgaatattaccaattggtgtagcaactactttaagtgttttcatacatcttgaaaagttagatttaataagttaagttttttaaatagttgcttgtggttaaaataaggtaaattaagattattgcataaaagtaatcgctttttcttatcatttaactttaagcttaaatactgatctcataatatgctttgattagcattttttgtgattgcaacacgattatttaaagcagcaattaaagcactagtttccatttcagcaataccagcttttttagcgttttttaaccttgcattcatatcaacataacagttgtaatagtttgttagatgttgttctaatttacttctaatctttttgccttgttgatctggatctaataacaagataacagtttgcttttcactgatttttttaattaggttaatagtttctttttttaaagctgaaccatttgttgtaattacatctacatcaaaaatttgctgtaatttagcttggtcagttttaccctcacaaacaattaccccatcaatttttatacgtgctttttgatccattcaatgtgacgttcatatattgcagaaactgataagctgttagcgtaacacagaacaacctcttcatataaagatgctagatcaactacttcaaactgctttacagctttaaacttatattgaggaatagagtttgatacaaacaagaaatcaattagtttttgatcaaatgcttccataaacttttgttctgcatcattgttaaacaaaccatgagttgccattacacacacttttttagcttgttctttttgtaatagcttggctgctgcaattactgtaccaccagtatctatcatgtcatcaactattaaacagtttttatttttcacttcacctaaaacattaattgattcagcaacattatgagatggtcttcttttatcaataatggctaatggtagttctagtgtatttgcaattaaccttgctcttttaaccccaccataatcaggggaaacaaccaccaagtcttttttaccaagtagttctataactctaaaaagaaagatgtgataagttcttaaagaatcaacgggaatatcaaaaaaaccttgggtttgatcactatgaatgtcagttagaacaaccctgttagcacctgcttttgttaacatatcagcaatcaatttactggtaattggttctcttccttttgtttttctatcttgtcttgcatatccataatagggtagaatggcagtaatacttttagcactacctcttttcaatgcatcaatagcaattaaaagttccattaagctatcgttaacattaggacaggttgattgaaaaatatagatatctttgttacgaactgattcatcaaaacggatataagtttcaccatcagcaaagtgttcgcaaaccattttgccctctgaaatatttagttttttgcagatattttcaaccagtgttttgcttttagataaactaaaaataacgtgctttttattatcgatactcagcttcaagctcgcgtcggattgttttctttttaatagtttcacgtttgtcaaatttctttttaggttttgccaatcaaatttccactttaattttgccatttctaaagaatactttacttgggattacagataaagattgttgttgttttttattgataatttgtttaatttcatgtttatttaataaaagtttcttaattctatctgaagcgtgatttaatggacctgcaaaactataaggtggaatagtgaactgttctaaaaaaagctcattgtttttaacaaaaacataagcttcttttaaactaccttgacctaaacttaaagctttaacttcacttccttttaaaactattccagcacaataagattccattaaatgatagtcatatttagccttaggattgttaacaagaattaacatttatcaatgaaattatctgtaattatacctacttacaattgtgcatcatttattgaaaaagcaattaattcaattgttaaaaatagacctaatgatttggaaatagaagttttaattattgatgatggatcaattgacaatactaacaaagttattaagaaaattcaagaccaaattaataatttaactttgcagtatttttacaaaagtaatggtaactggggtagtgttattaattatgttagaaacaataaactagcaaaaggggaatgagtaacagtattggatagtgatgacattttttcaaaaaaaacaatttctatttttcaaaaatatgcccaaaaacaaagatatgatgcgattatttttgactactataaatgctgaaaaaagtttttgtgaaaaattcctacctatgcaaggtttagaaaagaaattaaaggtgaattgaaaaaacaaacacctttttgtattcccttagctaagttttttaaaaatgaggttttctatcaacttcctaaactaagagaaaatgttggttttcaagacgctatttatacgatgcatgcattacaaattgcaaataatgttttccatgtttctaaagctggaggatattacttttttaaaagggtaggtaactctatgagtatcccttgacacagttctaggtttgatattgaagtacaaatctgcaaggatctgattgaaaataatgcgcaagagatcgctttagtgcatttacttcgtttaaaatttcgtaatttagttgatgataaaaagattaaatttacagttaaaagagacttttgttttagtggttttagttggtatagtaggttaattttatctctgatgtataacttctgattgaaacgttatttcaacagttctgaataacgatttttttgcttatttgcaattacaaactgtcattcattgagttttcattttcttgtcatttcctgaaccaattgatcaccatctttaatccaacaagcaggaaagaacttaacaattaggtttgctagtgcaataagtcctaagaagaaaacaatacttacaattacccctggtaaaatacttgtaccttttccttgaattaaaacaggcgcttggagaaatactgattgggtaatgtcaaataaggtgtaagcaatataaccaaagccccaacaaaatccaaaaagaataggaagttcattcttcttgtaatctttaaattcatatggcaggattaaatttgaacttgataaactccaagcaaatgcaccaccgataaatgaaaagatactaattaaagcaaacccagctgcactaccaataccaagtgttgctgcaaacatgatgattataagcaataccactatgttagctgttaataagaagtgcattcacctcttcttgtcataaatggttttattaaatggtgaaaaaacaacaaagcccaaagcataaccaataactcaaaaaatagcaagtgttgctaaacctgttgtgtacacaccagtacttatcaaaccatttgatcctgatggggaaacagtttgcaagatgctaaatcaagctggagttaacggattgactattagtattaaaactatgccataaacaccaattaattttcatgttgttttattctttaagatatctatggattttggttgagtagttaaactcatattttccttagtttgcttttgaggaaagatgtgatctatcttgctttcaaaccataaaaataaacataagttagcaaacacaaccaaaatcatcacagtcataatgtaaacccagtattgagaggctacttgttgaacttgttcaaataaaaacggtgtgaaaactactgcaatcccaatgttaaaaccccaaaggttagcattagataggattgatttttttctgtttgaagaaagattagcaattgctggttgagtataaactactaaggtagttccaccaatagcaattgtgcttctaaagataataaacaatgcataaccagtaattgatgcagctgtaccaatactattaccatccaaacccttaataagttcaacacttgttccatctgcaagcatcgttttaccattgatcatcaccggtccaagtaattgacccacttgtaaattgctacttagtgaacttaattgagtttttactgaatctgataaaggtcttaataaagttaattgattatgaccattcaaagggtctcctataataagaaagggaaaacaaacacacatgattcccatcatgattaaaaccgcataacgataaccaaatttcaaaacaacaactccacaaagaatagaacctactgctctcaataaagtgatagttcagttggtggaagatgtggctatttgcccagcattttcagtaaagaaagaacttaaccaaccactgtactgtggtaaagtggtggttgattgagtaagtataccagttggtttaccactaattcgatcaattacaaaccattcaactacaaacaatagatacccaaaaattactatgatccacagggtaataagtttcagatcacttacttttttttgacttttattttccacaaattaagacagaatttacattagactaattttaaaagctgtagctaattgttttttagaacaaactgaatcaaagaatttgaaattgtctttcattgttaacagcatttaacaacaaaattgaataaaaataaaaaacagaccctgatggtctgttggatatttaatggcggaagcggtgggattcgaacccacgcaccgtagaacgatctaacaccttagcagggtgtcctcttaaccacttgagtacgctcccagtttgttgttaaatttattataaatatgcaactaattagcgctttagatgtttaaaaatttattaagaccatccctattttttaactggagccaaaaaacatttaaaaataaattttcgtttttaaaacaagcagcaaatgcattacaaaaacaggctgttatcaatgataacaatgttgcatttgaagctttaaaaaagcgtgaagaagagattacaactggaattattactagtttagctttacctcacttacaaagtcaaagtgttatagaaccttttgttgctgtatttaaggttaaaaacttagattgacaatcattagatcaaaaaccagttaaattgatatttttaattggtgttcttgttgacaaaaccaatttgcatcttgatttcattagtaacttttccaagttaatgttgaatgaaacatttgcaagtaaggttttaaatgtcactagctataacggcttgattaaactaattgatctttttaaccaacaaaaagtgcaagaccaaccagctgttgaaacaaaaaaagagtatgactttgttgctgtaacagcatgcccaactggcattgcccatactttcatggctaaagaagcgttggaagcatttgcaaaaaagcataacttatatgtaaaagttgaaactcaaggtacagatgggatacaaaatcaacttacaagtgacgatattaataacgctaaaggtgttattcttgcttgtgatcgtttaattgatttctctaggttttatgcaaataagaatgtgattgaagtgtcaactactaaagccattaaaaaacctgatgaggtgtatgaattaattaaaaaccaaaagggtaaacagcttgcaaatagtgctaaaccaactaatcaaacccaattagctgaaagtgaaggggaattcaactttaataattttcacaagcggatttatcgtgccattttaagtggtgtttcttacatgctaccattcgttgtttttggtgggatattaattgcactctcttttctaattgatataaataacgctaataatgctggtggtaactttggcacaattaatcctgttgctaactggttaaataagctaggaggaatttcctttagtttaattgttcctatcttatctgcatacattgcatatgcattggtatcaagacagggattattacctggttttgttgttggtttaatctcttcaggacaatttttattaaatattgttctgaccaatggaacaattgaatggttagcaccatcacaagtatcaagtggcttttttggtgctatctttggaggacttttgagtgcttgcttaataattgttcaacaaaactacatctataaaaaattacctcaatctttgcagggaattaaaaacatcttgtttattcccttgtttggtactttattcactgctggtttattttgggttattaacattcctttaatttatctaaactatggattaagtctgtttttaaatattatgaacagccctatcctagcacctttacttggttttgtaattgggttgatgatgtgctttgatttaggggggccaattaataaagcagcttatgtttttggtgttgtttctttacaaaatcaaaatgcaggaacaatttcgatggctgcagctatgctatcagggatggtacctcctttatcaattgctttggcagcttccattcgaaagagctgctttgataaacaggaattacctgcagcttatgcttgttatctgatgggattgagttttattagtgaaggtgctatcccatttgttgttaaaaaacctaaggtgatgttaactgctaacttaattgctggagcaatttgtggagcattaacaggagcatttgccttatcaattcgtgctcctcatggcggtgtttttgtgtttgcacttttaaaaactactttacaagggattgaaggagctacattacaaactggagttggcattggtttggcattggtttgtttaataattagtatgatagttggtagtagtattatcattggctatgacttgattgcaaaacataaccaaagaaagcaaaatctgaatagttaattacgcttgcgcaattgattattatgttgatttaaacaagcaaaaaaatagtgttttaatacctggtggtaaggggattaatgttgctattgtaatgaaatcacttggttttgatccaactgtcattacttttttgggacaacccactaaaaacttatttttagagttggtaaaaccttatgatctaaatatagttagcttcatttctgaaactaaaacaagaattaaccttaagttattaaaagatgaaaaaactactgaaattaatgatttaagtcctttaataacagatgctaatctaactgaattgttaacttttttaaaagctaatgttaagaataatgatttggttatcatcaacggaagatttaaatttgaagctttagaaaaagttctaaacttggtctttacattaacagaaaatgtggttatagatgttgatgaaagcaaaatgttaacgcttttaaatcagtctaaaccactagttatgaaacctaacattgatgagtttcaaactatgattaatactttttttcacgatcaacaaagcttaatagcagcaattaaaaaatttcattactgtaagctcttattattatctgatggtgacaaaggagcttatctttttgatcagaataagttattgtttgtaagttctatcactcctaaacaagtagttagcaccacaggagcaggtgatactttgttggcagtttttttagcaaatttgattctaaaggtagatttaaaaactgctttgattaaagcaactaactatgcaagtgcaacaattagtaagttaggtgttgttgatagtaaagacaaaattagtgttataaccccaaaaagttactatttataattaatatttgatggtaaaaagaaagcgaaagcctaagcttaattcgcgtaatattttaactatccagattgttttaacaatctttagtatgatcttttttcttactttgctatctttaatcttgtttttgagtttgcaaagtaatttagctacagctttagttgaaaacagaaataaagctgtggaacttgtagataacattgtctttttttaaaagaactgatttttaaatttgtctctgactaatttattagtgtgttaaacctaattaaaaatgttattcgttctttaaagagtgctaagattgctttaatagcgttaacttttttaatttttgttgctgttggtggttttgtgttgttaaataacacagttaataattttaacgctgcttttaactatgtcacccacactggtaaattaagcaatgccatcattaatgagcgttatgactttggtaaattagagtttcaagaacagaccaataattctcagaatagtagcgacagttttactttaactttaactaatgattcaagaacaagttttattaataatgccttgagaactaacccttctttgtatgaaggattagtaacccaaacttttagctatcaaaacaaaactgaaatgactgaaaaaaccaatatagttaatcagtctaaaattattgctgctaacaatcttaacaatgcattaagtaaagataaacagctcttagtttcaggtcaacttgaaaaactaaatgctgtttttcgggaatataaagctattaatattactgacaaaagtgtttttaaaaaattgatagtatcagaacctaatgatttggtaaatagcctagttatttttgatggtcaaaatttatctagctccaaacaaagtgatttcaataattttttaaatcaatttaacgaaattaaatcaaagggtaaagataatttaagtactactttaaaaactgggcagtatcaggcatttttacaaactctttttgattatgctcaagcgagtgaaacaacattaaaagatcagcttcaaaagttaatttcaaatccagattcaagtgaaacaaatcaggttaaaaatctctttgatactccaagtacgcttactaatattgggggtcaattaaccttacaatgaacagaaaatagcctaacaaaacagatagttatctttgatcctagtagttatgaaacaatagtcgctcctggtaactgaacttatcaacaacaattaggtaaagaagtttatcctgatattaacaactgagaaagtattaaaaaactaccacttgaacaatttgaaagtgaatttttaaaaattgatcaaaagtataagatcagtattgataatatcgattatttagttattggggttggaattagtccagattttgtttatcctgtttttagtgcatctttaattgttcctaacattgaaaatgaacaactttactatgttaaccaaactggatatgaaagaactttttcctcttttttaacaaatccagttgaaacagcaatagtagcaagattgattaatcttgaaagtgatcttaatactatcaaccagtgagctgttgaaaacatgtcatgaccaacaaacattaaagctgcatacagtagttctgataccactaatattttgaatttattagcagcaagaacagtttttatccctaatctaattaacacaattaatttagtggctttgtttttaactattgctatcctaactgttgctataattgtcagcattttaatcctgattagttatttaaagaaaaacactgagcaaattggcattttaaaagcaaatgggttaagtggtaaaaagattaaccttagcttgttaatctttgggttaattcctgctatagtaggtgctatttctggatatagctttggaattggatttcaagacgtagctattcatctatttagtaactattgatttataccaacagcaacatcaagtttttcagtagtaggattgttgtttttttcactgtttgttatcttaattatgagtagtatatcgcttttagtgggatcaattatcttaaagaaggatgttgtaaagattttaaagcatgacagtgaatttaaagtttcaagattaggacttagttctaagaaattgtttgctaggtttggtattatgaccaggtttagagtagcattagcatttaacgctccttgaaaattagtttttctaaccttgatgagttcatttacaatgatgattttaaaccttagttttgcaactaaagatagctttgaaaatgctcaatcaaaaactaatttaactaatcagaaccaccaatatgaatttgaactcgcttcagcaacaacacaaagtggtttattgaagtgacagttatttgcagaactaggtacaactgataaaagaagtgaaagtagtgtaaagcttgcaaataaaaggatggatattagtaatgttgatgcatctaaagattgaaagaaccaacaagtaattaattttttaagcgatgctagtggctttagtaatgatttaaattaccttgaaaacattgttcaatccaagataggtttagactattcattgggatttaacaatattgtttcaaatccctgaaggttaagtgaaacattaatgccaactaaccaagcatctgcttccaacactgcttttcaaaattttttaaaagcaatcattactataaatccaagccaaggatcgcaattcattaaacaaacccaagatccattaacaaaaagatttatctatgcaattgacagtgataaggcattaaaaaataataatgaacaaaacggttcccaaaaccacttaactttaaatgatgattttgctaaatttctctacagtcaatttgaattaattaaaaagagtgggaatgcaagtaatgaagatttaaatgcaattgattttgaaaacccccaaacaatcagagatttttacaacaagtacaatgctttaccaccattagattacaaacttagctttaatgtaataggtttacccaaagagacaattgctggacaaattgacacccctaagtatggatttttaacccttcatggtgaatatcaaaatactcctatcaagattaaaggtattaaagattgaaaagataaagtggataatttaggtccagttttgagtgatcaaaacaaccacattattaatcaagaattgtttaaaaattattcttttgatcctttgatagttaacaattctgctgcaaaaaaataccaacttgcaataggtagtgagattaatattgcagttaacaacagcttcaaacggattgacaataagatcattaatcaagatcctttagtgaatgctacctttagagttgtagggattaacaattccgctcatgatcctgaatttttcactagttatagtactgcttttaaagtattggaatatcccaatgaatggttcgtaaaaaaacttccatttaatagcttctatgctaattcgcttttaagttttgttcaatctacttcgctattttctgaatctggtatttttcctgctactagtagtttttcaactaataacactgtacttgttgagttaattaaaaaaaccattaattacaagaatggtcaaatgaatcaaacttcaagtaatgactcttctaagaaagaaaattaccaaaaattgcaaaaagcattaggaatatcaactgatttggagattagtaaagttaatgaatatgttgctatcttagcaagggtttataatggtttaccttacaactctactattagctttattagcaatgttgctgctaacaacgctttatttggaaatattgctaacaccaccaagcagattcaagctgttgtaattgcagtgattattcctataatcatgttgattattcttttggtttcaactaccttaattcaagagttgaaaaaaattgctattagattaaaagcattgggatattccaatttaaaaattctcgcttcatttttatcaatatacatccctttatttgcctttggtttgttgatttctatccccttttctatctatctaattgcactacataatgaggtaatttttgcaagctcatcgatctttttagatgcttttttaagttttgaaagtgcaattggttcaatgttagttttactagcggttttatcaattacctttgtgttgaattgattagagttgaacaaaattaagattgacaaggaaatcaaaaactcctaatggattttttctctttaaacaaaatcataaaacccaaccagaaattcactagtaatgaagctgaatttctacagatagctactgattatttggaggaaagtcaaaactatcttcaaaagggtttaaagcaattaaaaaaagaatataaaagatccattatttataaccctaaccttgaatataaacgctttgttaaatgaaaagaaaatttcactgaaacatttgaaagttattatgacaggttttttattaccaaatacaaccattattcactaagcttactttttagctttattaatgaacagattgaaacagttattgctagttacaactcatttctaaatgagcataataagttagcttttaataaagttagttttagttttgaaaagaaactttttgaagctacacaacagtttaataacttagaaaaaaacactgctattagtgatgatttaccgctccagtttaaagttagaacaactcaactaaaagcccaaagagaaagggaattgaagaacttgttgaataaaatcaagcttaaaaatttaagtgaaaaaaaacaagaaattttgttaaataactggtttaatagcaacgaacgtttgtttttaaaaaatgaagtgaaaaaggttaattgactaaactcgccaagacaaaaacaacaagcagctcaaattgatgatcaaaacattattgaattgaaaaatgtgtataaatacatcactaatggcattactacaaatgcagttcttaaaggagttgatcttgccattaaaagtcatgattttattgtgattttaggcccttcaggatctggtaaaaccacattactaaacattatttcagggatggatagagcttctagtggtagtgttattgtcaatggttataacatgatttgtttaaatgatagaaagctcactaaattccgtcaaaagtatgttggttacatctttcaacaatacggtttattacctaatttaacagttagagaaaacattgagataggagcaaatcttcaaccagatcctagtaaaaggatcagcattgatgcacttttagaagcggttgggatggatagtttgcaaaagaagcttcctaatgaattgagtggtgggcaacagcaacgtgtttccattgcaagagcttttgctaaaaaccccttattaatttttggtgatgaacctactggggcacttgatcttgagatgacccaaattgttttaaaacagtttttagcaattaaaaagcgttatcaaacgacaatgattattgttacccacaacaatttaattgctaacttagctgatttagttatctatgtagcagatggaaaaataaaatcactacacaggaacttaaatcctaaacaggttgaagagatccattgaatttagattatgaaatacttatatgccactcaacaccttactttaaatgctattaagcatgctaagggaggacatgttggcatggccattggtgcaagtcctatcttatttagtttatttactaaacactttcactttgatcctgaccaaccaaagtggatcaacagagatcgctttgttttaagtgctggccatggtagcatggcattatattcaattttccattttgccggacttatttctaaacaagagatcttacagcataaacatggtcaaattaacacttcttcccatcctgaatatgctccaaataacttcatagatgcatcaacaggccctttaggtcaaggctttggcatggcagttggcatggtgttagcacaaaagttattagctaatgaatttaaagagctaagtgataaattgtttgaccattacacctatgtggttgttggggatggagatctacaggagggggttagttatgaagttagtcaaattgctgggttatataaattaaataaactaattgtgcttcatgattcaaatagagtgcaaatggatagtgaagtaaaaaaagttgctaatgaaaatctaaaggttaggtttgaaaacgttggttggaattacatccatactgatgatcaactagaaaatattgatcaagctattattaaagccaaacaatcagataagccaacttttattgaagtgagaacaactattgctaaaaacacccaccttgaagatcagtatggaggacattggtttattcccaatgaagtggactttcaactttttgagaaaagaacaaatactaactttaacttttttaattatccagatagtatttaccactgattcaaacaaactgttattgaaagacaaaaacaaattaaagaagattacaacaatttgctaatttctcttaaagacaaaccactttttaaaaaatttactaattggattgacagtgattttcaagccctttatcttaaccaactagatgaaaagaaagtagcaaaaaaagatagtgctactagaaactatttaaaagattttttaaaccaaattaataatcctaattccaacttgtattgcttaaatgctgatgtatcacgttcttgttttatcaagataggtgatgataatctccatgaaaatccttgttctagaaatatccaaataggaattagggagtttgcaatggcaacaataatgaatggtatggcacttcatggtggtattaaagtgatgggtggtacttttttagcatttgctgattattcaaagccagcaattcgcttaggtgcattaatgaacttaccagtattttatgtttatacccatgactcttatcaagtagggggtgatggtcctactcatcaaccctatgatcaactaccaatgttaagagcaattgaaaatgtttgtgtatttcgtccttgtgatgaaaaggaaacttgtgctggatttaactatggtcttttaagtcaagatcagacaactgttttggttttaacacgtcaacccttaaaatccattgataacactgatagtttaaaaacactgaagggtggttatatccttttggatagaaaacaacctgatttaattattgctgctagtggtagtgaagtgcaacttgcaatagagtttgaaaaagttttaactaaacaaaatgtaaaggtaagaattctgtcagttcccaatataactttacttttaaaacaagatgaaaaatatctaaagagtttatttgatgctaacagttcacttatcaccatagaagctagtagtagctatgagtggttttgctttaagaagtatgttaaaaaccatgctcatttaggagcttttagttttggtgaatctgatgatggagataaagtttatcagcaaaaagggtttaatctggaaaggttaatgaaaatatttacttccctaagaaattaaaattatcttaatgttgtataggttttgaaaaacaggattggcaatttttatgcctggttgcatcttactttcatcctgttcttttagaagttatatcccaactcctagtttaagaaatactgttggtaatcacaacagttatgttaataatactgtccctaaaaacaatttttatgaaaagttttatgatctaacttttgctttaaatttcactaatcagaaaactcaagagtttggtactggttggttaattgactgaaaaggagatgaaactaaagatcttaatacattaactattgctagttcttctattatttcctctgtaagtaatcattctttaaaagaaaaacaagatgacaagctttttattgcttatattgccaccaatttacatctgatagatggtttaaagaatgatcatgattatcaaccatacaataaagatggaaatggtcttagttttccatttgatcaaaaaacccaatcattcttattgggtaggtttgccaatcctaagataaattccaaaccagaagagatgaactaccaagttcaaactcgtttaaaacaagatgcaatggtgtttatccaaaccagtactttacctaaaactgcttatgcaggaattgatcctattaactttgattaccatgaaactagtgatgagagtggattttgaactaaaaaacaaagcactgcaaacttccctagaacaagaacattaaaaagttatgctgattttgcagttttagaggtacccttattcttagataatgctaatgatgccaagatttatcaagagtgaattagaccagcagttcaagcttataaggagctaggggatgttgaaaatatttttgctaaaaccccatacgctgaatatattaataacacctactacttattgggttatcctgttactaataacaataagtatcagtttatcttaggtcaagatgaaaagtgaaagttttctcaacaaacttctgtattaaagcactatcaaaaacaacctcttcaacaaagaacagtttatgttgaacgtgatgatggtcttcctacattaacttttaatgaagataaactcactcatgttcaaggtactgatctaattaatgttgatcagattaccgatactaatttaggaaatggcttaataaattatgctggtttatcacgctttactttaagctatcacaatgttgaatataagttatttggttatggcactattttaaataatactaattttccaggtggatcttctggtagtgctgttttcaacaaggaaaaacaactaacaagtatttactttggttcactgattaatgtaacaactggaaataacaggaatgttaatttaggtttgggtcaaattcttcgtacttataacactaataatagtaagcacagtgcaccatcatcatatgatttaatttttggtgataaaaacaccatcaagttttatgcacagtttgcaaaagaaaagcaaactcatctttgaaataaaattcaaacatctgttaactcttcaatcagcttttacaaagacaaaaaataataattaactaacaatttgtatttgtgttaagacgttatctaactctgagtttttctagcttgcttttattagcactgctgtttttaacaggctgttcttttgttagaccacaatttcgcaggggctttagaacccagtttaaaattaactctattccaactgttagtgatccttatcacattaactacgacttaactttttcattaaactttgcttccaacaaaagaaatacttatggtactggttggttaattgattggaaaggagatgaaaataaccctgagaaaaatgatccttttaaagtttatttagctactaacctccatgtgatagatgctttaagaaataataatgactatgaaccatataacaaggatagtaataaccaagcttttaatagtgaagagatcactaggttcttttctataggtaaatacacatatcctagtatttttagtgaattaaatttcattatcaatgctagagaagcgtttgtttcgattcaaacctctactattcctaaaactgcttatgctgctgttaactttgttgaaacacaaggagaggatgaaagttatacagattcattatcaactgataataaaagagatatttatgcggattttgctgtgatagaaattcccttattcttaactaaccatcgcgattatcaagtatttaatgaatttattaaaccagcaatagaaacatacaaacaactaggaaactcttcctttgaaaaaaaacaactagatcaacataaaaacgacaacttttacatgttaggttatcctttggttgagagtagcatagatgctctaattttgaaccaaagaagacagtacaataacagttatactgaaaaatatactcctcaaactttaaccaaagatcaacgtaccattgacttaagcagagaagttcctactttaattcagaacaaaacagaaaactctacaggaagtcaattactagtaaatcaatctttaagtagtacatctgaagggattattgaatttattaagttacctgaatttaaactcaattatcataataaaagttaccgtcaatatggtagaggttttgctctacaaaacactaactttagaccaggttcttcaggaactttaatgttaaataaccaaaaacagatagcaggtatttattttggtgttttagattttggagaagatgtaagtttaatgagtaacattggcgttggacaaattcttcgtgttcctcaaaagaacaatactagaaatagatcaattgctactaataaaagcaactatgatttgatctttggtgatagcaatacaactaacttttatgcaaaatttgctagacaaaataacacccatctttatcagatgatttcaaatagtaaagatacaaaattaaagtatgtgaatactgttgaaaaaacagtaaaagctagtattaaataaaacaaaatagtgactttctttttttatactcataaaaatggaaaatcaaaacagttgtagttctgtaaaagaaaaagagttatataatccaaaaaagccttttctttttgcggtaatttctttctttgttttcataatattttttgctttagcaggttcatttaccaaatttgcattagaagaaagcaggggttatagttttcttgttattgtctgttatcttctaggaacagtttgtttttttgtttttatctatttttggttttgattcttatctgaattttttgcaaatagagttctagttaagttatgagatttacctactaaaaagagaagaaaaagacatgcaaaaaaacaaagataattagttaagttttaataactcagttggcaaataaattagggagttattagaacgctattttttattaatttaagtgtttgtttaaaatttattaagtacttttttaacttgttaaaaaagtagttattttattagttggaaagtgcaaaaagaattaaatatttcaaatgataaaaagacttgtttaaatgaaatagaaacaagcaaagttaaatttctaacaacaactttaattttgttgtgatcaatattaataacactcttagttgttgttagtgtattagcatttaatttcattttattaggatctactaaacaaggattaccaaataccaatgaaatagagacactaaaaagttcattagccttgcaattatcacaaaatggtgtgatcttatcaatagcactacttgctttttttagttggatggcaattgttggaattcacagctttttagttggaattttagttaatcatcaaacacttaaaataagtaaaaagtatgttattttaggttcgatttttccaattatggcattaacaaatactctgtaattagaaaaaaattaaaagctttattaggagagggtaaggttcaaaaaggactcaaagttttaactattagttttatttgtgtttgaagcttgcaattgataataggcttttttgtatgactttttccttatgctggtgaggcaggaattaatataggaattaatttatctatttttaatttggctcagttagtaggctcagatataaatgtaataacttactttacaacttttttaacgctgctttttgcatttctttcatgagccgtattgcatgttttagcttgctttattttggtacatttgactatttataaacaacaagaatgaataaaaattaaagctatttacattttggctttaaccttaattgatttaatgggtttaattttggcttttggtattattgttgttaacaatacaaattcttcaagtgttgatgcaaaatcaaattccttagcattaatttttaagttcatttattttggtagttctatagcagcctttttaacagttttaagttttgctagttcagttgctttacttgtcaatttaataaaaaaagataagggattaaccttaaaaaattagttaacctcccccaacctctattttctgttactagtgcctaaggtggtattggagtatcacaagctcagtaaggatgtagtcaaagagagtttgggggtggatacatcaggttcaacttttgatccaactaaaaggttgaaaaaagatagtccaatgaaggattcaaacaaagacagtgagaaactcaccgaagcaactgcttcatccatgagtagtggtggggctacatccactcgcaaggccctcaaggttgaggtggagaaacaaagtggatcaactgattcacttttaaaaaacgactttgctaaaaagccactaaagcataaagaaaatagtggggaggtgaagttggatgcgagtggggagtttgccaatgataaagcctgaaaaccggtgttgaaaacagatgagataacaagagagagggggatgggggcgacttagactttctcccctgaatcggcaatggttattccttctccaactccccctccccttcttcttcttcttctactacttctacttcctcttctaccccactccccactttttctaacatcaatgttggggttaaatcaatgatcactcaacacttaaatcagcaaaacacccggtgggtgtttacccctaactcttcaccagacatctgaacgggagcagggtatcgcaagggttcatcaaacaccaacggcattcccttcgaccaggtgaaacctagcaataatagtcaacagtttaatcccaattcagatgataataaagtcacttcaggtggctcctccaaaccaaccacctacacccatttacccaacagtatcagtcccaccagtgactggatcaatgcgttgactttcactaataagaataacccgcaaagaaaccaactgttgctcagagcactgttaggaacgatcccggtattgatcaataagagtggaggaagtgggaatgagtttacccatacgagtgagcagcagtgaaacgaaacagataaattaggaggtaacctcccggggtttggggaggtgaatggcggtttttacccagttttacttatttaatagttaaaaaagctttagatttttatcaaatttttatctatttaatatttaagaaagtcgcaaatttttatcagtttattggtcaaagaagtcgcaaatttttcttagttttttatttgcttaatggttaaaaaagcgttagtttttacctttatttaattaataaacttcgccacccccatcaccgattctaaggctgatctggttagtttggcacaactagatgattcctatcaaatctccgaccaaaccatccataacaccaacctgtttgtgttgttcaagtccaaggatgtgaagcttacatatagttcaagtggctcaaataaccagattagttttgattcaactagtcaagctaacaaacccgcctacatcgttgaatttactaattccaccaacattggcatcaagtgaagcgtggtgaaaaaatataagttagatgtgccaagtgtttcaacaaccatgaaccaagtgttgcaagaattgatccttgaacaacctttgactaagtatacgcttaatagtagtttggccaaagagaagggcaaaagccaaagggaggtgcatctgggttcaaattcaaatcagtgacgatcgatgcgtgaccaacacggcttaaacaacaatcccagcccaaatgcttcaactggatttaaactcactaccggcaacgcatatagaaaactaagtgagtcctgaccaatttatcaaccaattgatgggaccaagcagggcaaagggaaggatagtagtgggtggagttcaactgaagcaacaacggcaaaaaatgatgcgcccagtgtttctggagggagatcatcagatcaaagtaataaattcaccaagtacctcaacaccaagcaagcattggaaaggatcggtatcttgtttgaaagtaatggagaggcgaggaatgttgttagcctccttcctctactttcaacccaacaaggtgaaaagtggtcaataccaaaccaccaacacctacaacaagttaattgaacctgacaagtgacaatcaagtagtgatttgaacaatatgaccaacttgttaaaactcctaacaactaaaaatgtgaaagcaaagttggggaagacagcccaatctcaggaaaatagtgggggggtgaaatgataaaaatgtttttaaataactacattaattctcttaaacttactaaattatttttccatttcgaactattatttgaaaaaagttattaattgcaagttgataaagaaaatgaagcaaaataacaagaaagaattatctaaatttaaatagactagaattaaattaagaccaaaatgttgcatgcaaacaacatatgctcttttagttgtttttggaattttattagttctaattggactaggatttttattttgagctttaaaaatttcacttaaagaacaaaagaaaggtcaaattactaatgatttgacttccaataactcacttaaaaatgaagttcctagagggagttgatgaaaaagaaacaacaaattagttttatttttgcttgcaatagtttttttaatgctaggaataggtggacttgtttcccttcctaagctgtttggttaataaaatttagtagttttaaaatgcagattagtttagttaaaatccgcaataagtttaaacaaagaaaccgtggttcttttcgtcagtgagttggtaagctttccaacggtttgatgatccctattgcagttttgcctttagcaggtatttttttaggaatcggtgatgccatttcttccaattcatctggcattgttggtgtgaaattttttggtgaatttattaaacaaggtggtaatgtagtttttgctaacttacctattttgtttgcagttgcaattgcgatcaccttttctcaagatgcaggggttgctggattttctgcttttgttttttgggccacaatgaacgcgtttatgagttcattaattattcctgttgatgcaaataatactgcttcaggttataacatcctttattgaaaagcagtacctcagtcagcaattgcttctactttaggattaaattcactttcaacttcagtttttggtgggattatagtaggggctttaactgcatatttatataacaagttttatgcaattagattgcctgatgtaattgggttttttagtggtactaggtttgttcctattatttgtatgactattgctattccagtagcattacttttattgatggtttgacctggtgtttctatcttattaaatttaataggaactgggcttggaatcttaggtggaagaggatatggtgctaacagtttaatctttggatatatagaaagagcactaattccttttggagtacatcatgccttttatgcaccattatgatatacaagtgcaggcggtagtttgcaagaaattgcaaatcaacaagtttggattagagctcctggtagtgattatgtaaccagagtgataggttgagaagattttaatactccaggaaaatgagttattcctgctgctttagctaatggaacaagtggaatgatgaatggagctactacaacaggacaagatagtacatctgcactttcaaaatacatgagtaaagaatcaacaaactttctaagttgaaaagaacttgttgatggtcttacacgtaaaggtaactttgatgaattggctaaaaacggtttattagatggttctaacaagatttgaattggtttaaaccagtcagggatcttaggtaaaaaagtactgttaagtgatggtaaggactacactattacctttaaaacttttgctaacaccacgccaacattctgaagccatggtgctcatgcacttttaccaattagtggaactccaagtgcaataactaatggagttactgttaatggtactgctaattctaaaacctataatgtcagtcagttcactgttgcagttccttctttaaacccagcacaatattcccaaggtaaattcccattcatgctaattggaattccagcagctggacttgcaatgatcttagctgctcctaagggtagaagaaaagaagctagttctattattggtagtgctgcattcactagttttctaacagggatcaccgaaccttttgaatttacctttcttttcttagcaccatggttattctatggtatccacgctgtattagctgcagtaagcttttgattaatgaacttattgagtgctaacgttggacaaaccttctcaggttctttcattgactttatcttgtatggggctttacctgatggtaggggttgattagcaaactcttacttagtacctattattggtatctttttagcattgatttatttccctaccttctatttcttgacaattcgctttaacttagcaactcctggtagaggtggtaagttaattactaaaaaggaatatttagcagcaaaagcagctcaaaaaactgatcaaactactaacactaactttaatcaaacccaaattgaagctggtatgttactaagagcttatggtggaagtgaaaacattgctgaattaggggcttgcattactaaattaagagtaacagttaaaaaccctgaacttgttaatgaaactattattaaagacttgggagcagctggggtaatgcgtaccactccaacattctttgtagcagtgtttggtactcgagctgctgtttataaatcagcaatgcaagatattatccaaggcaaagtaaattgaacagagttgcaaaaagtcttagataaaaatgatagtactgttgaaaaaccagaaataaaaccaaccccagttttaaaagttcaagatgaaattgtgatcctctcaccagttaatggcaccttaaaaccgctcacccaagttcctgatgataccttcaaaaatcgtttggtaggagatggaattgctatcttacctagcgatgggcacttcaaagcaccaggtgatgtgggtgtgaaaactgaacttgctttccctactggtcatgcctttatctttgatgttgatggtgtgaaagtaatgcttcacattgggattgatacagtaaaaattaatgctgataaaaaaccaggggaacaacttgaagtgtttgatgtaaaaacaaaacaaggagaatacactaaattaaagagtgaaagtgttgttgaagttgatttaaagaaacttaaacgaaagtatgatccaatcactcctttcattgtgatgcaagaatcacttgataacttcaagttggtgccaattcgccaacgtggtgaaattaaagttggccaacctttatttaaactaatttataaagataagaagagttaatcaataaaactcgataataactaaaagccataaaaccttggttttgtggtttttagcttgtttataacaatattattgcagttttactgcataatgtaaaattacacagcatgtcagatacaaatactgaaaaacctgagttagtttcccttaataagttaagtgagatgcgcactaacatcgggatggttaaacgttattgaaacccaaagatgggattctttatcgaacctgaacgtaagcataataacgatttattgaagcttgatctacagtaccaagcgttaaaaactgcttataacttcattaaggatgttgttaaaaatcacggacaaatcctttttgttggaacaaagaatgattatgttaaaaaactggtaattgatattgctaaaagagttaatgttgcatatattacccagcgctgattaggtggtactttaactaactttaaaaccctttctatctcaattaacaaactcaataaattagttgaacagcaaaagcaaaatgcaaatgatctaaccaagaaagaaaacctgttactttcaagagagattgaaagacttgaaaagttctttggtggggtcaaaaatttaaaaagacttcctaatctaatagttatagatgatcctgtttatgaaaaaaatgcagttttagaagcaaacagcttaaaaatccctgttgtggcactatgcaacaccaacaccaatccagagctagttgactttattattccagctaataaccaccaaccccaaagtacttgtttattgatgaatttactagcagatgcgatagcagaagcgaagggttttgaaaccttgtatgcttacaaaccagatgaacagatccaaattgaaattcctcccaaacaagaacgccaagttattaaccgttccaataccagaaacatcactaaccagcgcttaaacattaaccgtcaacaacaagaaactttatagagcagtgaacagttgaacaggacttagtgaacaagcggcaattaaaagtcgtcaagaacatggtgctaattttcttcctgagaaaaaagctacccctttttggttgttatttcttcaacaatttaaaagtttagttgttattcttttactgctagctagcttgttatcgtttgtagttgctattgtcagtggtttgagaagtaactgaaactttaaccatgatctgattattgaatgggttcaaccttttattatcttattaactgtttttgccaattcactaattggttctatccaggaatttaaagcccagaaatctgctagtgctttaaagtccttgacaaagtctttcacaagggtttttaggaatggtgaattaattagcattaatgttagtgaagttgttgtaggagatattatttttgttgatgcaggagatattatccctgctgatggcaaattactacaggttaataacttacgttgtttggaaagctttttaactggtgaatcaactccagttgataagactattgatagcaatgaaaaagctactattcttgaacagacaaacttagttttttcaggggcacaagtagtttatggtagtggcgtttttcaagtggaagcagttgggattaaaacccaagttggaaaaattgctaaaactgttgatgatagtgtaactaaactctcacccttacaacaaaaactagagaagataggaaagtgatttagttggtttgggcttggtctttttgctgtagtttttcttgtccaaactgctttattaggatttgataatttcactaataactgatcaatagctttaattggtgctattgcgcttgttgttgcaattatccctgaagggcttgttacttttattaatgtgatctttgcattaagtgtgcagaaactaactaagcaaaaagccattattaagtatttatcagtaattgaaacacttggatcagtacaaattatctgtactgataaaactggtactttaacccaaaaccagatgaaagttgtcgatcacttctgttttaattcaacaacccaaactgatctagcaagagcattgtgcttgtgtaataatgcttctatttccaaagatgctaataaaacaggtgatcctactgaaattgctctcttggaatgaaaagatcgcagtcaattagatttaaaaacctattacagggtttatgaaaaagcctttgattcaatcagaaaacttatgacagttgttgttcaaaaagacaaccgcttcattgtgattgttaaaggtgctcctgatgtgttattaccattatgtaataacgttcaaaatgaagtaaagaacattgaaaacttacttgatcaaagtgctggtcaaggcttgcgtaccttagcagttgctttaaaggttttatataagtttgatcaaaacgatcagaagcaaattgatgaacttgaaaacaaccttgaattccttgggtttgttagtttacaagacccaccaagaaaagaaagtaaggaagcgattttagcgtgcaagaaagctaatataaccccaataatgattacaggggatcatcttaaaactgcaactgtaattgctaaagagttaggcattttaactttagataatcaagcagttttaggtagcgaactagatgaaaagaagatcttggattacagggtatttgctagagtaactccccaacaaaaattagccattgttagtgcttgaaaagaagcgggatttacagttagtgttactggtgatggggtgaatgacgcacctgcattaatcaagagtgatgtagggtgttgtatggggattactggggttgatattgcaaaagatgctagtgatctgattattagtgatgataatttcgctactatagtaaatggtattgaggagggtagaaaaacttttttaacttgtaaacgagttttattaaacctgtttttaacttcaattgcaggaacagttgtagttttattaggactattcatcttaggacaagtttttaaaactaatttattacaacaaggtcatgactttcaggtgtttagtcctacccaactgctaattattaacttgtttgttcatggttttcctgctgttgcattagcagtacaacctgttaaagaaaaattgatggtaggtagtttttctactaaaaatctgttttacaaccgccagggatttgatttaatctgacaatcactattcttaagctttttaactttattgttctatagcttaggaattatatatgcaattaataaccgtgatttacaaactagcggggatctaattaatcgtgctggatcaacgtgcggtttttttattttgggtgctagtgctgctttaaactcattaaacctaatggtagataaaccattgcttatgacaaacccttggttttttaagttagtttgaataggttcacttgcttctatactggtatttttattgatcatctttatcaaccctttagggttagtgtttaatgtcttgcaagatttaactaatcacccagttttaataagctatagttttgggggagttattttgtatatggggatgaatgaagttgttaaacttattagattaggttatggcaatatttaacttccttaagttaatttcacccaaaaacagaattctcagtaaggcaaataggattgccagtgaggttgagagttataaaaactactaccgtaacttaactgatcaacagttatttgaagagtcaaataaactagttgatcttgtcactaagcaaaattacaccattctagatgtttgtgttgctgcacttgctttaattagagaagtggtttaccgtgagactggtgaatttgcatatagggtgcagatcataggagcttttattgttttaagtggtgattttgctgagatgatgactggtgaaggtaagaccttaaccattgttttagcagcatacgtttctgcacttgaaaagcgtggtgtgcatgttgttactgttaatgaatatctagctcaaagggatgctaataatgcaatgaagatcttaaaacgggttgggatgagtgtcggttgtaactttgctaatctctcccctcagctaaaacaagctgcatttaattgcgatgttacctacaccactaacagtgaactggggtttgattatcttagagataacatggtccacagttatcaagataagaagatcagagagttgcactttgcaatagttgatgaaggtgattcagttttaattgatgaggcgcgaacgcctttaattatttcaggtcctagtaaaaatgagtttgggttatatgttgcagttgatcgatttgttaaatcattaactgaacaggagtttaagattgaccctgaatcacgtgctgcttctttaactgaacttgggattaaaaaagcagagcaaacatttaaaaaagaaaacctttttgctttggaaaacagtgatctttttcacaagatcatgaatggtttgactgctgtgaaagtttttgaacagggcaaagagtacattgttcgtgatggcaaggttttaattgttgatcactttacaggtaggatattggaagggagaagttacagtaatggcttacaacaagctgtacaagccaaagaatatgttgagatagaacctgaaaatgtgatagtagctaccattacctaccaatccttctttaggctatacaaccgcttagcagcagtatcaggtactgctttaactgaatcagaggagtttctcaagatttataacatggttgtagtaccagtgccaactaaccgtcctaacatcagaaaagaccgttctgatagtgtatttggtaccccacaaattaagtgaatggcagttgttaaagagataaaaaagatccatgaaacttctcgacctattctgattggaactgctaacatagatgattctgaactcttacataatctgttactagaagctaatattccccatgaggttttaaatgctaaaaaccattcaagagaagcggagatagtaactaaagcaggacagaagaatgcagttactatttcaactaacatggctggaagaggaactgatatccgtttaggtgaaggggttgctgaaatgggtggtctttatgtattgggaactgaaagaaatgagtcaagaaggattgataaccaactaagagggagagctgctagacaaggtgataaaggggaaactaagttctttatctcactaggtgattcattgtttaaacgttttgctcatgacaagattgaaagagcgattagcaaattaggtaatgaaacatttgacagtgccttcttttccaaaatgttaagtagaacccaaaaacgggtggaagcaattaactttgacactagaaaaaacctgattgattatgaccatgttcttgcaagtcaaagggaattgatttacaaacaacgtgataagtttttattagcaaacgatttaagtgaaatgatcgacaaaatgctagaaaagtttgtacaacagttttgtgatcaatatagaaaccaaaagaaccaaaacttaattaatcacattgcactagcagaagctttaaatcttgagatgaacatgcaaaacaccattaatccaaaggtgtttgaaaacatgacttttgatgttgctgttgataaaacccgtaacttagtagctaaaaagattagtgataaagttaatgttttgaccaaaccaattgctttaaacaggtttcgtgacattatcataacttcgatggataaacattgaactgaacacttggatagtgtttttaagttaagagaaggggttgtacttcgttctatggaacatacgagtcctttaaatgtttacattaaagaaacagatatcctttttaaaacaatgttgcaaaagattgctcaagatgtcattgtgcaaattgctaacctcacaactccagatgaatttgatcatagcttaatgcaagccaatgctttaaagaaactagcagcaattaaagcagatgaaaaatcaaaccaagagtaatagtttatttcaactttccactaactatatacctactggtgatcaacctgaagcaattaagaaattatcagaatttaaaactaagcagcaggttttattgggggccacaggcacaggtaaaacctttacaattgctaatgtaattcaaaacagccaactcccaacagttgttattgctcataacaaaaccctagcaggtcaactcttcaatgaattaaagcaactgtttcctaaaaatgcagttgaatattttatctcttactttgatttttatcaacctgaagcttacttacccagtaaagggatctacattgaaaaaagtgctacagtcaatgaagcgattaaacgcttaagagtctcaacactgcattcactttcaacaagaaaagatgttattgtagtaggttctgttgctagtatttatcccacctcatctcccagtgattttgttaagtattgcttgtggtttgtggttggcaaagattatgatttgaaaaccattaaagataggttagttagtcttaactatgttgttaataaacaacaattaaccccaggaaaatttcgctttcagggtgatgttttggaggtatttcctggttacagtgatgcttttgtgatcagaatctccttttttgatactaaagtagaacaaatttgtcaaattgacccactaacaaataagattttaaaccaactctttgagattaagataggtcctgctgatgaatatgttgtaaaccaatctgatcttgatatagcaattaaaaatattaaacaagaacttcaggaacgagttaattatttcaataagcaaaatcttgttgaaagagcacaacgtttagccaccattactaaccatgatctcaatgatctgaaggcttggggattttgtagtggagttgaaaactatgctagacacttagagttgaggatggctaactcaaccccttacagtatctttgattattttaagggggattggttactggttattgatgaatcacaccaaactttaccgcaacttaatgggatgtataacactgatctttcaagaaagcaaagcttaattgattatggttttcgactcccctctgcacttgataacagaccgctctcatttgctgaattacaacaaaaaatgcaaaaagttatttatgtttcagcaactccaagagataaagagattagtttaagtcagaataatgtcattgaacagttagttagaccaacttacttggttgatcctattatcgttgttaaaccaaaagataaccaggtggaggatctcattgaagagattatcaaccaacgccaaaacaacacaagaacatttgttactgttttaactattaagatggctgaaaacctcactgaatacttaaaggaacgcaaaattaaagttgcctatatccataaggacattaaagcattggaacgtttattgttaattaatgacctgagaagaggtgaatatgagtgtttagttgggattaaccttttaagagaagggttagatgtccctgaagttgctttagtttgtatctttgatgcagatatcccaggactacctagggatgagagaagtttaatccagattattggacgtgctgctagaaatgaacatggtcgagttgttatgtatgctaaccatgttactgaacagatgcaaaaagccattgatgaaaccaaaagaagaagaactgttcaaatggaatataacaagctacataataagacaccaaaaacagttgttaaaccccttacctttgttcaaccaatcaaattaaaagctaagagtaatgcagaaaaaaatgctgcattaatcaaacaattaaccaaagaaatgaagaaagcagcagctaatcaaaattatgaacttgccattgagattagagattccatatttgaattggaaaaagaaattggtagtaaaattaaagtatagcaatgcgacagtttattaagcttagcctcttagtctttgtcttgcttttcttaagtgaacttatctgtaggttctctttacgcttagtaaattctattaaagcgagatataaatcttcagtattttcctacactgcttgtttgctatttttaaagagttttcaaaacttttctaatgcttttcagaagttagctaactgggtattttgatttgaaaatgatgttaatgaactgttatctatcttttactttaactttgatcagaagagtgaaaaagtagattacaacttctttaatggttataaagttactgctcaaaaagtagttgaaaaagaacagttattaacttgtaagttaagtgattactaccgtttatttagagataaaaccttttgatttgaacttatcaacaactaataagatccttattggctgtttaagtttgctctctttataaattcataacttttctcttaacatatgaaattaagtacaataactactatctgcttgtcaatatctggtgcttttggtactactgcaattgctttaccaactacagtagcattgttaaaaaaccaccaacagcaaaacactgaaaaacaacaaaacccgattaaagatatccgctttggtttaaacaatgtacaggttccaaataccattccgttacaccaaactgtggttgaagtgaccaacaacaaagcaattgttgattacaaagatgcaccccaaaaattctttttagctaaaagtgcgttaaataataaactccaagttgagtttgataagttcttgttaagaacaggagtgattaatgctttaaatgcagatttgaaagaatggatagaccaaacattatttatccccaatcaaagtttttttgatcttagtgctaataaactcaatttaactttgtcaaatcaaagcgaagtgagtttagatcttgagtttatttttactaactttagtgataaaaatcaaccattaaaactcccctttgatggtagtgtggtggttaatgctaacgagtcatacacctattcagttaaagcaacactacagaaactaaaagtattgacttattcaagagcagatcattctgtagggattagttatgcaataccaacagtgagtttaaatggcaaaactcaaaatgactttagttttaacccctttaaaagtaatattaactttgctttcaaaaatgtctacaatgctttaaatccgtttgaagcacaacaatacctggttggccaaggtaagtttttaaaccaaaaagttaatgctgatgatgttaaaaatgacattaataatcacattgaaacccagtttaatgttgctaaaatcacagcaactcttttaggaaaagcttttaagcagtttggtgaacataaaaatggtcaaccactttcacttttaaaagtactaagtggattaaacaatgagtttaaacaactctttaattatgtcagacctggtttaggtgattttgttagtgatttaatccaaagctccagtcaatcaagtaataaaaaaactgtttaccagctattatttgaaaacaagacaacaattatccacttgttgcaagatcttaatattagtgaactgaactctgttttaccagttgttgatattttgtttgaagggattaacagtgcagaatcactataccaaaggatccaatcatttaaggatttaattgttcctgctttaaaagctgataagcaacttaagagcttagaagcgattattttagcagttttagacaatcctaatacctatgtttttgatcttgtttaccaaaacaaatcgattctgtttaatttgttaagtgattttcttaaaaacaccgcaaacactttaccatttcttcaagaacagtttgatattgttaaccacttatttgccaatgaagcgatctttgatctgttttccaatgctgactttgttgagaagattgctgatctttttttagcaaaacaaaaggtacaagaagttaataatgatggaactaaatcaacaaaaattgttgattcgattttagttgctacccttaagggtttagttggtgatcagctcagttcaatcactgaactgttaaacatctatatctttgaaaatgaatttttaaacagaaatgatagtaatagttcagttaaaaaacaacaaactgatagtctaaaaaatctgtttagcgtaattggtgatattttaagtgagaccaatgttaacaagatcactttacacgcagttaaaaataatgaacttctttcgttagttgaaacagcttcaacactaaaaattaaacatcttaatgttcaatacaaagttttagttgataagtttgaattgaaaaacagtttcattaaggaactattaaattttttcccagatactaaagatatcaccccaactattaaaaaggtactgtttgaaagtgaaaattataaaacactccgtaagaagtatgaaaatgaagggttcccaggttatcactgggctaagttcattgtcccaggtaccttcaattctgctgaaaacactttctattctgctattgataaaactaaatcaattcgcgatctgtttgctgacatgttatttggtaagagtttagagagtgttaatgacagtgatagttttatcaaaattaatggttcatttacattaaagtaccacggtgataacttaaatttactccctaactaccactcattaatcactaagaatgttggttatcaaatagttaatgttaattttcatattgatgcaagattgctaactgcagaactacaaaacacggtattttcaaatccaaaaccagttattaaatcacctgttgaactctccaaatccttatttgaagtttgaaagactatctttgaaaactcagttaaccaaatcttaaaaaaagaatatactttcaaagataatctaaagttctttccttttaaagctgatggctcctcgcgcttagaatttgatctatcaaaacctgatcaacgtgttattccttttgcttttgttgatggttatcaattccaactaaaaaaagagttaattcctaacaaagaaacaaaaaaagaagctaattcttcaccagttttaaagctttatgatgcagttaaaagaaacgatagacaatatcgtcctaatcaccaccatgatgatctgagaaactatcctagccttaaatctcaactagaacttatattaaaccttggtgataagcttaaagctaataatgattttatagatgacactgttgttaatgctttgcaatataaaactagttttaaatctactctaaaagttaacagtttaggaattcctattaaccttttctttttcacattgtgacttaaatttaacttagaaattccaattgacggttcattaacattaacatccgttaatgttgttttcccatacagtttgtatgatactagttcaaatgaatttacaaggatagtcgatcgcttaaatttcactgataccaacttctatctaaaagatgcatttcctaatttctggtttgttggtttctagagtaatgaaactaaaccactaactaaactaccaactagataaacaatcaagttcatccaccaaaacccactagttttttgtctgtaagttgcactttgatcttgatattgattaaaactaactaatggttttgcataaacactacctaacttaagatatctgttaaacttactaatttcataccgcattccatcacaagtttttaaacggaatatcccctgtaaacaaacaagtaataagttaacaaaaaagctagttagtactgaatttttaacaaccactgtaaaattggttgacttgtgaaaataaatagtaatgtttaagatcaaaaagaaaaggattagataaaatacgctaacaactatcccaccatactcagctttattactgtttttgttttgatttaaaaccatctagtaatcgttattagtatcatttttttataaaataatcaagaacatcagcacatgatctttatcactaaatttatgtttggtttcaaatgaagttggattataaatcctgctttattgtaatcatgctttagatttagaagctggttacttttgtttcaggtaaccagtaccatttccaaaaaactgagaacctgaaaaaaacaggttctttttttatttctatttagtaaatgttcaagtatattcttaaacgattaggactagcagtagttgcgatgtttatcgtaatgtctatagtcttctttttagtgaacgctactggtaatgttcccttgtcagccacttctgcaagagatattgctgcagtgcaagcacaactacaagagtttgggtttaatgaccctattatagttaggtattttcgctattgagctaagctattttcctttcaagctgatgctttaggaatttattatgcaaaccctaaccaaacaattggtgagattgtgtttgcaagagtaccaaataccttatatgtggttttaatctcttttttaattggttcattgctagggatctttttagggatggtttcaggattgaatagagggaagtttttagatgcagcaattaatgtgttggtagttttatttgtatctattccttcatttgtagtgggattagggttacttaaactagcaggatttttaaatctaccaccacggtttattaactttgatgatgctttttttagctttgatcgtttcttgcttgcatcaattatcccgatcctttcattggtcttctattcatcagctgcttttacatacaggattagaaatgaggtggtggaagtgatgaatcaagactatattaaaactgcaaaaagtaagggacttgggatgtttgctgtagctaggtatcatatctttagaaactcgattattccttctattcccttgtttgtatttggaatctcaggtgctttttcaggtggatttattattgagtctttgtttggagtacaaggggtatctaggatcttaattgattcagtgcaagttaatgaaactaacatggtaatgtttaatatcttgtttatccaagggattcccttattagcaagtgtctttattgaatttatctatgttttagttgatcctagaattaggattgcaaatagttctaatgttagcttattaactaagttaaagttcttaagttcaagacaccaatggttaatgaagtgaaacaagattaacagtgataatgcccaaaatattgtgtttaactcgccactgcaccaccagctattagaactcaatgcaattgattacaaaacaaaaacagttcaactaacaactgaacaaaaaactgctctcaatatcagtgcaactgctaactttatcttacttggtaacaagtgtttaaaactcaaaacaatccatggatagaaataaaagttttgaccctaacttatttaaaagggttgatatcaacttattaaagcgaaatgatcagcttattggtaaaccaactaccaattcaatagaaattatcaagcgcttgtttcaaaacaagtgggccatcttattttttcttttaatagttgttattgtgctattagcaattattgtgcctttaacttcccctttttcagcagtaactcctgtttcaaccaatgccttagcacaaaatctaccaccacggtacttatggcataaaccaggtgacattttagttcataagattacagcaagatcaattgctgaaatctctcaagctagtggagttttagtaggaacattacctagtgcaaatagtaatcccttagcaactaatgtccagtatgatattgctccttttcaactccaagaattgcgtaattatttccctttattggggactaatggacttgggattgatatttgaaccttgttgtgagcttctgttgccaagtcattgtgaattgcagtagtagtagcaattatagcaatggtgtttggaaccatttatggagcggttgctggaagctttgttggacatatggctgataacattatgagtaggatcattgagattattgatatagtcccttctattctttgaattattgtcttaggagctacattccgctttggtggggttaaacaatttgatgatagtgttgtaatctttactttaatctttgtgttttgaacatgacctgctactacaaccagaatttacattttgaaaaacaaagatacagagtacatccaagcagctaagaccctaggggcacaccaaatcagaattatctttgttcatatgttacctgttgtatttgggagattagctgttgtgtttgttagtttaatcccagcagttattggttatgaagcttccttagttttccttgggttaaaaccagctactgatattggcttaggggcacttttaaaccaagtaacttcaagtgataatgtagctttaatcttaagttcgattgttagctttgcagttttaacagtagcagctagaacatttgctaatgctttaaatgatgcaattgaccctagggttgtaaaacgataaaatggcacttaaaagaagtaatttctttgttgataaagaccaacaactaaaggataatttgatcttagacatcactgatttacatgttaactttaaggttaaagatgggatcttacatgctgttagagggattgatcttaaggtagagaggggtagtattgtagggattgtaggtgaatcaggcagcggtaaatcagtgagtgttaaatcaattattggttttaatgacaatgcacaaactaaagccaaactgatgaactttaaaaacgttgatattaccaaactaaagaaacaccagtggaagtattatagagggacatatgtctcttatatttcccaagacccattgttttctctaaacccaacaatgacgataggaaaacaagtaaaagaagcgatttatgtggcttcaaaaagaaggtatttccaagctaaatcagacttaaaatttgctttatcaaataaggagattgacaaaaaaacttataaaagtaaactaaaagagatcaaacaaacctaccaacaaaaaataaaacctatcaatgtagagaaaaaaaccttagagatcctgcagttcattggtattaatgatgccaagaaacgtttaaaggcattcccaagtgagttttcaggagggatgagacagagaattgtgattgctattgcagtagcaactgaacctgatttaattattgctgatgaacctactactgcacttgatgtaactattcaagctaaggtattaactttaattaaacaactccgtgatctacttaatatcactattatctttattagtcacaatatctctttaattgctaatttctgtgactttgtttatgttatgtatgcagggaaaattgtagaacagggtctggttgaagagatctttacaaatccactccatccctatacatgggcattgatttcttcaattcctgaacagaaagataaaaacaaaccactaacttctatccctggagttattcctaacatgttaaccccaccaaagggtgatgctttcgctagtagaaaccaatatgctctagcaattgactttgaataccatccacccttttttgaagttactaaaacccataaagcagcaacttgattgctgcatccccaagcccctaaagttgaaccacctcaagcggttattgataacattaccttaaccaaaaaagcactgcaatttaaagatcaataatggaaaaccaaaacacaaaaaaaccacttgttaatgttaaggctttgagcatgatgttcaaggtcagaggaactctttttaaagcccttgatgaaattggttttactgttaatgaaggggacttctttggggttattggtgagagtggtagtggtaaatcaaccacgggaaaatgtttgattagattaaacattcctagtggtggaaagattgagattgccaaccacttactctcaggaaaaaaacttactaaagagaataaccagtggttaaaacaaaacatccaaatggtgtttcaagacccttattcatctattaaccctactaaaaatgtgctaactgtgatttcagaaccgctggtaattagtaaaactgtttttggggaaacaaaacaatacttaaagagtttgcaaaagctctcttttaaagtaaagaaaacattgttaaggaatgatattgaacttgaaaccaagtttcacaataacttttttaaaaccgttattaagcaaattaatgaatcattgtttaactttgaagatcttgattacaaggatttaaaaccatcacatttaaggcaaagaatcataaatgaaacagataaattcattgaaaaaattagaagtgagtttgcccttttttatgatttttatgctaaccaatcagtacccttgcaaaaggcattagatgatgcgaattcctctttaacaccatctagtgttattgagttaaaaaaccagttaaaagcattacaaaaacaagcaaagatttcaaaggcagcatgggatattttacaagccctaaagcaaaaccaaaaggagttgaaagattatgaaaattatgtccattttgaactccaaaaaaagccacgaatctatcttaatacctgacttttaacaaccaaaagctacattaaagattccaagcaaaacatgcagcttactgatgatatctttgctttttcatataacagtatggttgacaagaaaagaaacttggttttaattctttctaaatactataagctgttaccttatttctatgaccaatcagtatttgataatgctgatcaatttgatgaaattgctaaccttatcttttttgatttagttgaaacattgcttggtgtaactagtttatttaatgatgcattagcagctgataaagtcccactaattaagtttgctaagttcttaaataagttatgtgacttgcgctttttaaccttaaaaaagagctttaaaaaaacaagagtaagttgtagctttagttttaacagtgaacctgaaatcttgtttgccaacagctgctatgatttgcaacaaatgcctcaaatcattaaacccttttgagagaagctttttaatgaacagaactaccaaaagattattgattcagtttcaagactgaatgtaatgattgcaaattacattaccaaagcttttgaaattaaaaaaactattgatgaaaaactaagggagtttaaacaacaaaatttagctttaaaaaaagcttattcagctaacaagaaaagtgaggcaaacaaagcttccattaatgagttaaaagtcaatttaaaaacacttaaaaaacagcttaaacaagagaaaaatactactaaaaaacaatcaaaaaaggaattaaaaccacttttaaaagaacaccatactgctttaaaactccatgatgagtttaaccatgatttacgcaagtggttcaaaaaacttaactttatggttaagaaatacaaccgactggaaaacagccagaaaaagttttgtttagttaaaaagttaaaagcgcttttcaaaaaacaggatgaaacactgcaaagtgaattaagaccaaaactaaaaacatttggtgtaattaactttgagtacaaacgtgcagtcaaagagtccaatgtctttcgattggtgcattttgctaaaaatatctttaaaccattcttgttttttaacctcaccaagatttttatgagaaataaggtctatgaagcacttgatagtgttggtttaaaaagagaacatgcttacagatacccccatgaattttcaggcggacaaagacaaagaattgctattgcccgtgctttaatcactaaacccaaactgattattgcagatgaattgattagtgcacttgatgtttctatccaagcccaagttattaacatcttgaaagacttggctaaaaaacacaacttaactgtgcttttcattgcccatgatttatcaatggtgcaaactgtttgtaaccgtttgatcattatgcataggggcaagattgttgaacggggcagtgtggatgagatcttttcaaatccagttcatccctacacccgttccctaataaaagcatctcctaagttaagcaaaatcaatgttgatctcgcttcttttgatgaaaacttcacttatgatagtgattattcactaaccaatatgcccttttatattaaagttcctaacagtgaagaacatgaactttactgtactcaaaagcaatttgatagttgaatcaaagaggctacgccgataaattaatttaaaattttccaaaaatgtgggagctaattaagcgtttgtaccacagcaaaatatggctaaaaaaacagttacaagaatcgctaagattaacctaattggcggacaagcaaaacctggccctgcgcttgcttctgtagggattaatatgggtgagtttaccaaacaatttaatgaaaaaaccaaggatagacaaggtgaaacgatcccttgtataatcactgcttttaacgataaatcatttacttttgtcttaaaaactacccctgttagtaacttaattaaacaagctgctaaactagaaaaaggtgctaaaaatgcaaaaactattgttggaaaaatctccttacaacaagctaaggagattgcgcaatacaagttagttgatcttaatgctaacacagttgaagcagcattaaaaatggtgttaggtacagctaaacagatgggaatagaggtaactgattaatgaaaaaactatcaaaaaggatgcaagctgttaccaagctcattgataaaaacaaactttatcctatccaagaagcatttgaattaattaaaaaaacagcaattactaagtttgtcagttcagttgatattgctgttagtttaaaccttgatactactaaagctgaacaacagttaagaggtgcaattgcttttccttttagtattggtaaatctatcagaattttagctatcactgatgatgagaaaaaagctagtgaagcaggtgctgattttgttggtgggcttgataagatagaagcgataaaaaatggctgattagattttgatctaattatcacttctcccaagttcatgggagcattaggtaaactaggaaaactattaggaaccaggggattgatgccaaacccaaaaactgaaacagttactgatgatgtagttagtgctattaaagcttataaaaagggtaagaaagaatatcgaactgattcatttggcaacatccacctctctttaggtaaaacagataccaaaactgagcacttggttgctaatgccatggctttaatagatttaattaagtctaaacgtcctagcacagtcaaaggtacttacattaaaaatattgctttgacaacaacaatgggaccaagtttaaaagtaaagctacctgattaatgcccacctataaactaattgttggtttaggtaacttaggtaaaaagtatgagaaaactcgccataatgctggttttatggtgttagatagactagctagtttattccacttaaactttgataaaaccaacaagttaggtgattatctttttattaaagaaaaagcagcaatcttagcaaaacctgctacctttatgaataatagcggtctttttgtgaaatggttacaagatcactttcaaattccgcttgcaaacataatgatagtccatgatgaaatagcgtttgatttgggagtaattaggcttaaaatgcaagggagtgctaacaatcataatggcataaaatcagtaattagacatttagatactgaacagttcaatcgtttacgctttgggattaaatcacaaaatacgagtaacatattgcatgaacaggtaatgagtgaattccagaatagtgaactgactaaactggaagttgcgattacaaagtctgttgaactgttgaagcgttatattgaaggagaagagttacaaaggttaatggaatattatcatcatggctagtgaaaaacaatatatagcaggggtttcaggtggatctgattcaatgctaatgcttaaactttaccaaaagaagattgcttgtgttgttcatgtcaattacaacaccagatcaacctcattacgtgatcaaaagttagtagaacaatattgtcaaaaattaaatattccactggttgttcacactgttgatcctgatctagtttgaaagaagaactttcaaaatcaggcacggaaaatccgctttgatcagtttaaaaagactgcaaagctataccagaccaacaagttattattagctcatcaccgtgatgatttcattgagcaggccaaaatgcaactagatgcaaaaaaacgtgctgtttactatgggattaaaaccaggtgtgaattgtatggtttgaaaatctaccgtcccctaatgaaatactgaaaagatgaaatcattgccctctgtagacaagaccatatcccttatgagattgatgaaactaacaagttacctatttataagcgcaatgaagtgaggttagagatagaaaaatggtctaaaatcgaaaaagaacagttttatattgctatctgtgcaatgaacaaaacaattgctcaaaaactgtttgtattaatgaaaaaagctaaaaaatggttattacaacctgatgttagggaattgaaacggttttcaattattgatcaaaaacagttaatttatagctatcttatttatcacaagattaatgttaatggtgagaaaattgatgctatccttgattttatccaacctagtcaacaaaaacaataccgcttgcaaaacgatatctttttgatggtgaaaaaccagtgtttagcacttttatacaaaagctaaatgaaacatttaactgtcaaagcattagttttgcaatttaatgattgtatccaactcattgatggtaaaaacaacatagataatgtgattactatccctgggttaaaaaggagtgtttttgaactattaggactattttgtaagccaattggttcagttgctattttaggtaaacgtgaatttatttttttaaatcaaaagccagttgagcaacagaaaaagattattgcaaacctcttgaaactcaaaccacctgcagttattctaaccaagtcatttcttgattgtggtgttttgttagctgttaatcaaacttatcaagttcctattttaaaaactaacttgttttcaactgaactctcttttactgttgaaacctatattaacgagcaatttgctactgttcaaaagttacatggggttttacttgaaatctttggtgttggggtatttttagaaggaaagagtgggattggtaaatctgaaagtgctttagatttaattaataaaaaccaccttctaataggtgatgatgctattgagatctacagattaggcaataggttatttggtagagcacaagcactggcaaaaggctttatggagattagaggtcttggcatcattaatattgaacgtgcttatgggttacagattacaaaagaacaaactgaaatccaactagcaattagtttgttgagtttagaggagaaaaacaacgctagttttgagcgcttaggcagtgatttaaaactaaaaaatctgcttggggttaagattagttactatcagatccctatctcttcaggtagaaaaacaagcgaaattattgaaagtgcagtaatcgattttaaacttaagaaaagtggttacaattcagcaaacgagtttatcttaaagcaacgtgccatgttagaagaacaaactgatgaatagaccaagttgatcaactgcatttaatattggtggtggatttcccatccagtggtatgggatcattgtctcaattggcattatttttgccattttaatgtttgtctttaaactgatttattgttacaaattacaagacaacagtttttatttttttatctttattgctgttttaacgatggttttaggcgctcgcctctggtcatttgtaattggtgattccaattttgctaacaacaatttctttgattttcgtaacggtggattggccattcagggtgggattttgttaaccagtattgtcggagtaatctatttcaacttctttttaaatagtaagaccaataaaaccaaaacgattgctgaattactgaataataagaatgaaataaaagctgtttatgttgaaagaaatatctctgttctagtgatgttagatctgattgctccttgtgttttaattggtcaagcaattggcagatggggtaattttttcaaccaagaagtttatgggtttgctttagctggaacaatgaatgatccccaagcattggctaatacccagtggggatttttaaagatcttaatgcctaaggtttgggatgggatgtggattgatggtcagtttcgcattccgctctttttaattgagtcattttttaacactattttctttgtgttaatttactttgtaatggattttattaggggagttaaaagtggcacaattggttttagttattttcttgctactggaatcattcgtttaatcttggaaaactttagagaccaaaccttttattttcaaacttcaataaccactagtattttgtttattgtcgttggtattttaggaattttttattgccagtttatccatgtcaaattaagaaattacttctgaacttatttctttctttatgccttttataaagtagctgcttttttcactacactttttttgaataacagaaagcaaatggcacaacagaagtttgctttttatgaaaaatcacttcccaataagaagcgttctttttttgaaatgaagtattacaatgatgtaacaacacccaaaatttatcgtttaactgatcaggaaatgaagttatttgataaattagaggcagttacaaccagctagattttgttagaatacttcagttgtctatatggctacaatagcgcaattaattagaaaaccacgccaaaaaaagaaggttaaatcaaagtcacctgcactccattataacctcaaccttttaaacaaaaaaactaccaatgtttactcaccactaaagcgtggtgtttgcaccagggttggcaccatgacccccagaaaacctaattctgcactaagaaagtatgctaaggttagacttacaaatggctttgaagtacttgcttatatcccaggagaaggtcataacctacaagaacacagtgttactttattaagggggggtagagtaaaagatctccctggagttagataccatattgttcgtggtactttagatacagttggtgttgacaaaagaagacaacaacgttctgcatatggcgctaaaaaaccaaaaccaaaatcttaacttgatcagttaaataatgagaaaaaatcgtgctttaaaaagaactgttttacccgatcctgtttttaacaacacactggttacaaggattattaatgtcatcatgaaagatggcaagaagggtttagcacaacgcatcttgtatggtgcttttgagatcattgaaaaacgcaccaaccaacaacctttaactgtctttgaaaaagcagttgataatgttatgccccgcttagagttaaaagtgagaagaattgctggttctaactaccaagtaccaactgaagttccccctgacagaaggattgctttagcactaagatggattgtgatctttgctaacaaaagaaatgaaaaaacaatgcttgaacgtgttgctaatgaaattattgatgcttttaataacacgggtgctagtgttaaaaagaaggatgatactcacaagatggcagaagctaacaaagcctttgcccacatgcgttggtagttatttattatgtcaagaacagttgatttaaaaaacttccgtaactttggcattatggcccatattgatgctgggaaaaccaccacatcagaacgtattttgttccattcaggtagaattcacaagattggtgaaacccatgatggtgaatcagtgatggactggatggaacaagaaaaagaaaggggtattactatcacctctgcagccacttcagtgagctgaaaaaactgcagcttaaacttgattgacactcctggccatgttgactttacagttgaagtggagcgtagcttaagggttttggatggagcaattgcggtattggatgctcaaatgggagtagaaccacaaactgaaacagtatgaagacaagcttcacgctatgaagtaccacgggtaatctttgttaataagatggataaaaccggtgctaactttgagcgctctgttttatcaattcaacaacgcttgggagtgaaagctgttcctattcaatttcccataggtgctgaaaatgatttcaatggcatcattgatatcatcactaaaaaagcttatttttttgatggtaataaagaggaaaatgctattgaaaaaccaattcctgaacagtatgttgatcaagttgaaaaactttacaacaacttagttgaagaagttgctagtttagatgatcaactcatggctgattatctagatggtaaaccaattgaaattgatgcaattaaaaatgcaattagaaacggggtaattcactgtaagtttttcccggtattgtgtggttcagcatttaaaaacaagggaattaaactcttacttgatgcagtggttgattttctcccttcacctgttgatgtcccacctgctaaagcaattgatgcaaacaacaaagagatatctattaaagctagtgatgatgctaactttattggcttagcatttaaagttgctactgatccttttgttggtagattaacttttattagggtttatgcaggagttttaaaatctggttcttatgttaagaatgttagaaaaaacaaaaaggaaagggtatcacgtttagtgaaaatgcacgcacaaaatcgcaatgaaattgatgaaattagagcaggggatatctgtgcagtaattggcttgaaagatactactactggagaaactttaactgatgataagcttgatgtgcaactagaagcaatgcaatttgctgaaccagtgatctctttagcagtagaacctaaaactaaagcagatcaggaaaagatgtcaattgctttatcaaaactagcagaagaagatcctacttttaaaacctttagtgatcctgaaacagggcaaactattattgctggaatgggtgagttacaccttgatatcttagttgataggatgaaacgtgaatttaaggtagaagttaacattggtgcacctcaagttagctttcgtgaaacctttaaatcaactagtgaagttgagggtaaatacatcaaacaatcaggtggtagaggtcaatatggacatgttaaaatccgttttgaacctaataaagataagggctttgaatttgttgataagattgtgggcggaaggattccaagggaatatattaaaccagttcaaactggtcttgaaaatgcaatgaattcaggtcctttagcaggttacccaatgattgatattaaagctaccttatttgatggttctttccatgaagttgactcaagtgaaatggcttttaaaattgctgcatccttagctttaaaagaagcaggtaaacaatgtaacccagttttacttgaacctattatggcaatagaagttactgtacctgaacagtactttggggatacaatgggtgatatcagttcaagaagagggatcattgaaggtactgaacaacgtgataatgttcaactaataaaagcaaaagtacctttaaaagagatgtttggttatgccactgatttacgctctttttcccaaggtaggggtaattatgtaatgcaatttagccattatgctgaaactcctaaaagcgttgttaatgagataattgctaataaaaaatagatacttaataaaaatataactttactcaatgagtttttccaaaaagtttttatgcactacaatatcattcttttagttgatggtacgcttagtttagaacaagctaaccaagttgaacaaaaacaccaaaaattgcttgaaaaggcaactgaatttaaaagtgaatacttaggtttaaaagagttggcttaccccattaaaaagcaactttctgctcactattacagatggagttttcatggtgaaagcaattgtactaaggagtttaaaagagctgctaacatcaataagcagataataagagagttaattattaacagagaaaaagactatggttatttaggttcagttaaccctaaaaaacaacaactgtctttgcagaagctaaccaagtataatgagattattgctagtgaaaataatcctgataacccagatgcgcctgtcacttctggtctagcttctgttaaaccacggctatcaagagttgaaaaacaaaaggaacgtgaacttgaaaagtgaacggttgttcaccaatcaggtaactttgatactgtacagatcaatccttatcgtcctaggataaaacgctttttacaaaacaaccaacaaacctcccaagctaataataaccaacctcgttttcaaaatcaatttaaaaaaggagcaaaaccttagatgaaccgggtcttcttgtttggtaaactcagttttactcccaaccgtttacagacaaaaaatggtacgttaggagctactttttccatggaatgtcttgattccagtggttttaataatgccaaatcattcattagagtaactgcttgaggtaaagttgctagttttattgttgctcaaaatcctggggtgatgctttttgtagaaggaagattaactacatataaaattactaacagtgaaaataaaaacacctatgctttacaagtaactgctgataagatctttcatcctgatgaaaaaactaccaatgaagaacctattaaatcaactgtagttgattcaccctttatgaatcccaaagcaagtgttacagaagctgagtttgaacaagcattcccccatcaagatgaaactgattttaacaacattacccctatatttgaaaatgatgtccaactagaggaggaaagtgatgattaataaagaacaggatttaaaccaattagaaaccaaccaagaacagagtgttgaacaaaaccaaactgatgaaaagcgcaagccaaaaccaaactttaaaagagcaaaaaaatattgtcgattttgcgccataggtcaactaaggattgattttattgatgatttggaagcaatcaaacgctttctcagtccctatgcaaagattaatcctagaagaattacaggtaattgcaacatgcaccaacgtcatgtagctaatgctctaaaacgagcacgttacctagctttagtgccatttattaaagattaaatatgaagataattttgaagcaagatgttgctaaattaggcaagcggtttgatgttgttgaagttaaagatgggtttgctatccattttttatttcccaaaaaactagctgcacctttaacaaagaaagcaattgctaaccgtgatttgtttttaaaacaacaacaagaacaataccaaaaaaatcgtgccttagctgaaaaattgaaactagtaattgaacaaacaccattaacttttcaactcaaacaacacgatggcaagccatatggttcaatcatcaccaaacaaataattaatttagcaaaacaacaaagacttgatttacagcgctttatgtttaaagataatgtgcgcttacagtttggtgaacacaaactaattttgcacctttttgaggagataactgcaactttaactgttatagtgaaccctgaaaatgggacaacaaactagttttaaatatgcaaatgatagcaacattgaacgtgctgaaagacgtttgatgcaagcagttgctcaaaacagtgagggcattgatctaattttcaataaacttgaaccaattgatttttttgcaacccctttcaaactcatttttcaaactgcaaaagaaaactaccaattaaataaccctattattggttctggtttactagaagcggttaagtttaaacttgatgctaatgatcaatccactaaaagtgaacttgaaattttattcacaaagatcttattaatccgtttaccacctaaccaaacagagattaaaacactggttgatgttgttaaaaaagcttctatttttcgcaggttacaacagtttgctaagcgtgtttacaacgaggaatttaagttaaaagaagatcgttttgaaggctatttacaagctattcaagatgattttgtcaagattatccacagtgcttttagtaacatctttgcttttagctatgatgagattgccaatcaagaggaagcattaattaaaaaggttcaccgtggggaattgatcatcagtggactttcaagtggatttttaaaattagatcaacttacatcaggttgaaaaccaggagagttaatagtaatagcagctcgcccaggtagaggtaaaactgcccttttgattaattttatggctagtgcagctaaacaaattgatcctaaaactgatgtggtcctcttctttagtttagagatgcgtaaccgggaaatttaccaaaggcacttaatgcatgaaagtcaaactagttacacactaaccaaccggcaaaggattaataatgtctttgaagagttaatggaagcatcttcaaggatcaaaaacttacctattaaactctttgattacagtagtttaacactccaagagatcagaaaccaaattactgaagtgagtaaaaccagtaatgttaggttagtaattattgactatttacaacttgttaatgctttaaaaaataactatggtttgacaagacaacaagaagtgacaatgatctctcaatcacttaaagcattcgctaaggagtttaatacccctattattgctgcagctcaactttctagaaggattgaagaaaggaaagattccagaccaattctttctgatttaagagaatcaggttcaattgaacaggatgcggatatggttttatttatccatagaactaatgatgataaaaaagaacaggaagaggagaacacaaacttgtttgaagtggagcttatcttagaaaagaacagaaatggtcccaatggcaaagttaaactaaactttcgcagtgacacttcttcttttattagtcaatattcccctagttttgatgaccaatacagttaatttatgaaactgaagttttacaaactacctttaattactacagcatttagttttgtatttttaactgcttgttcaacaccccaatcttccttttttctccctgcacaaacaactattagtactttaaaaattaatggtatggaaaacaaaacaggttattttcttgaaacgcagcgttctcgtggtagttacaatcccaccgcttcacttactatgattaagttaggagatgaaaaagagtttaaaaacgtagatacaaccaagcaagatgaagttttgtttgccaacatttatggtggaatctcttcattgcttaacttcagaattatccaaccgatgttaacctactgaaacttagttaacaactcattaagtcagattggtagtactaatgacttaattacattcaaagatagtggatataaagatcaacttgcaaaagcgcttgctaacaatctcatagttgctgatgaaggtaataataacttttggtttggtttaaaagccctaaagtttgatacggttaaactccaagctaataatactgctactagttcaacaagagcttcaactactcaaaatactaataataagattgatgcacgtgaaaaaatcaccattaatgggaatggtggaacaaataatgatcaaaatgctactgttcaaaagttgataggtattgaaaatattgaagttgagtttagctttgttaaaactggttttaatggaaatgagattaagtttgaagattatgtaacagattcttcccccacaacatctttattaaagcaagtttgaaaaagtaagtgaaataccgagttgacccacaccagctttaaattcaaactcaattctttcaatgttttgttaacttatcaattggaagcaaaccaaaaaagccaatatcttcccaatggctttagctttctttttccatctaatttagaaggaaagatagatagttcaaaaagctattgaaacaatcttgttgatttttcaaaaagaaccacaaatgaagagaacacaatgctactaactgatttgcaaaagaaacaagatcaagtgaatcggtttgttggttttattggtcaaaaccactttactttaagtgctaacagcattaatgaaaagcagtttaacgatgctagtactgctgatttttttaaagcaatctttcaaaaagtgagtatcaatgaataacaattttagccattcagttttgaaaagaaaagtttaaattaatggtaaaattattcattaaactttccttgttagttgtagttttcaatactgtttgtatttcgaagttcattttaaaaaattcgtagttctagatctttaaaatatgttatttaattgtcttttttaatttcataaattgtttgaaaacacaaaaaaatatctttaaggtcaaggccttactactttcacttttttctgctgctgttaccatcactatttttgctttacctatctttgcaaacaatggttctaaaactgatttaggtttgctttctaaaaatagtgctgattttttaggtagttcaaaaagaagtcttgctggctttgatactccttttagtccagataacctccagtatttagaaaaagaaactgattatgatcagaactttaaaagttttactgaaaagtttaaagatgaaaaaataactaacaaccaacttggtattgttgatatctataacttattcagtggttttcacaagagtgtcaaaagcacagttgacttaatgaaccaactgcaaaagcaagttgaagctgctaatgctatcttcccagttgatgatgcttttgttaaattacctaaagtacctactgaattatttaagttagttgatgataatgtctttcctaagttaaatcctaagggcttaaatatctctgataatattgctgcactttttgaaagatataaccttaaatcgattgaacttaagaactttgacttagctttcttgagaaaagctgatgtaattatcaaagacaaggttcgatataactttgagatgcaaatgcagtttcaaactgtttatgttggtggagggaataccgttattaacttagactttactttaaaagcccaaaccgttaactttgctaacctccaagatttacaaaacacttttgttaaagttggtaatgatctttccacccaactcttttggattccaactgttaataaattaactgataatgcaggtaatgatcttacccatattgctaaaactgtgattggtgaatcgtttttccaaaccaatgttaacttagctaaatcagttattgaatatgataaggttcaaccattggttaaacaagcttttgaagagcgagttttaactcctttcaaaaaggaaagagaagctgctaaaaaagcttatgaagaagaacaacgtcgcttggaagaggaacgtaagcgtcaactagaagagctaaggagaagagaagctgaggagaaaagaaaagctgaagaagcaaaacgaaatcaagaaaaagcacgcagagaaagagaagcttatgaaaaatcatttaactcctttaaagactttaaattttactggttaactaaaggtaaagatgttactaaaaaagctgatttaattgatgcacttaaaaccgctattgctacaccagcatacagaaatagaacattctctttattaatcaaaggttttgctagtggagttgaacgttatttcaacgctaacaagaatgataaagagttgaaaaaacttgcatttggtgaaaaagggatccaattccctagagcagatgctggggtaaatggtctttacatgagtaattttttgaggcatgaattgacaagcaaagcaaaattttcacttaacctaaaagatataaaagttgaaaatacggttgaagatactcaattgtattggaaggataatggcattcatttaaagcaagccaatccttataaattcaatctaaatatcaagatcaagtacaacggctggtataatgtccactggtgaaactggctccctgctaaaattttagggattcctacagactgaagtggtgagatgaatttaacatttgttgtcaacggtgacctatcagaaattgttgataaacatgattaccctggtactttctttcaatttaccgataaaaatgaattgctatttaccttagcagttagagaacaaattaaggttgataataatcattttatgggtctgttaaaaagccaaaaccttcataatcttcagcttgcttctggtgctacaaaacctcctgttgttgatttagctagttatttccactttgtattattgactgaaaaatcttaatctattaagaaatttttgatcagttacttttacctagataaatttaaagtttatttgtggtaatggatgatctattccaaagaatggttagctgtgttctaccgtcatgaagagcttttattgatgaggaagttaaaaaaccttattttcaagctttattagaaaaattaaaggctttaaaagcaacaataattccaaaaccagaacttattttccgtgtttttagcttctttaagccaattgatacaaaggtaattatctttggtcaagatccctatcctagtcctaatgatgcttgtggacttgcttttgcatccaataattccaaaacccctgccagcttaaaaagaataattttacgtttagaaaaagaatatccttcgcttaaacaagaaagtagttgacaacaaaacttcctattgaattgagcagaacagggcgttttattactaaatggaattttaacaactactgtatttatacgcaacgcccataaaaattggggttgggaggagtttaactgtaatttgctaacttttctaaaaaatcaaaacattaaaccgctgttggtatttctgggtgttcaaactaaaaactttgttgttaagagtattggtaatgttgatggatttgagcatttatcatatccccatccctcaccactaagtggtaatttgtttctaacaaaccctaacgatctgtttaaaacaattaacaattggttgaaacaacataaccaaaaaataattaactgagcagttgttaaaaatgctagttttgaccaattaagttaattaaaaacaaagctgtagttgacacttgtttattgattagaaaaacaacaaccttgtaaaattatttaactaagtgattattacttaattgcactttagatgggagagattaaaaatactgcaccaacaagcgatatttccacttcaggatttatctattttgcagttgtttttctaatcattatagtctatcttttttttaaaaacattctctttttgttcttctttaaaagatatcctaaaaacacacctaaaattggggttagcaatattactactattgctatgattattgctgttgctgtatctgttgttttggtcttaatggctttagcaggggggttaacagcagcgctgttccgtggttatcctgggttccgtgttaccttagagttaattctagtgaagatttcaggacttttatttggtcctataattggtattttttcagcagctaccattgactttttaactgttattttttcaggtggggtgtttaatattggttatgttttaggagcaatcctaacgggaatgattgctggaattttacgtgaagttttaatttcaacttcttttttaaataacaaaactttaagtgattttgcctatcttgttttatcagtggggatggtatttgccagttttttagtaacccagttttttgttatctcagttacccaaaacttatcagcatttcaaagtaatgatcaaattgttttacgttttaacgcctcacctttaaatttcagtatctcattgcaaagatatgttcaaattattttctattttgcgatggttgtaatcatcacaatggtagtactttactttgtttgaataatcaagcaaaagcactttaactatgcttattccaagtttttctttcgtagatataaacatgctaatcaccaatttaccttatttgtgttaacaaaagaaaactggttttatctaattctgaatgtaattacattagcaaccaccagtttgctaatgattaacattgcatttattcctatctttgatacccaaacaactggacaaacttatgatttttgattattagttagattattgtttgctcctttgatcttcttacttgatattattgttatctatccaatcttgttattgttaaccccaatcatgttaaaagggtttaaaacagtagcatcagaaacccaaacaaaaggaatcaaaaagagtttttcagatatgcaaagcttaattatgcccaatgttattagtcacaaaaaacagcagttaattagaaaagagatgcaacagttagcaaaaacaatcagaattgatttatcagacaaagaagtggatgcacttgttgaagagtttaaagagatcacaaagagttttaataaggtaactaaaattgataccactaatgttcaaccgatgtacgctccatttgaatttagtccaaccccactaagaaaagataaaccagtagttgataaacacgctaagcaactacttaataactgttgtgaagttaaaacaggttttgtaaaggtatagttgtgcgatcaaatattttaagtctcagggcgatacttgataaaaaacctagtgccattaacgatgttttaacatcaattaatgcaaagatagaactgaataaatcaagtaattttttattgaaaaatactgttgaaatttattcaaaaaaaattaataaaagtgatgaaaagattctgctaaataacatcccttatgttttgaaagataacatcgctactaaagatattgtcaccactggtggttctttgtttttaaaaaactatcttccccctttttcagcaactgtgtttgaactgttagaaatgaatggcgcgttgcttgttggtaaagctaatatggatgaatttggcttaggtggaacaggtagttattctgcttttggtgttgttcatcaccctgaaaattccagtttaattgcaggtggttcttcctcaggttcagcttacgcagttgctaaagacattgttcctttttccattgcaactgacactggtgattcgattagaagacctgctagtatctgtaatgttgttggctttaaaccaacttatggtttgatatcacgtaatggggtatttccatatgccccaagtatggaccatgtggggatatttgctaagtttgttagtgatattgccattgttagtgatgttgttattaaacatgataaaactgatttttcttcccaaaaatcacctgatgaaaaccagtttttcaatgagttggccattccctttacaagatcaattcgcttcggttatttaaaaccactagaaaaactgtttaacaaacacctccaaaaaaaatgaaataatctcaaaaaaaccttagaacaaaaaaactaccagttgattccacttgattttgatgtggaacttctcaaagtaattgattctatttacaaaataattagttatagcgaagcagttagttgttatagtaatttaactggcattgtctttggtcaaaaggtgtttgaacctaattcaccaagtaattttgatcaaactattaccagaaacagagatcagtttttaggtaaacaactaaaaagaagatttgtaataggggcatttgcaactgatgagaagaattttgaaaagtactttgaaaaagctcagaaaataagaagagtcttagtggataactttctgaatctctttagtgatgttgattttgtattatcaccaagcgcttcttgttttgctagtaccattgaagatattcaagctaataagccatatacaaacattattgatgactttttacaattagctaattttgctggtagcccttctataactatcccttggttagttcaaacaaaagaccaaacaattggtttaagtattagtgctaactgttttgaagataaaaaactcttacaaattgcttattgatttgaacaactttttgatttaaaccatgattaattttgaagcgattattggaattgaagtccatgtagttttaaatactgctagcaagatgttttcaaaagcacctaaccgcgttgataatcaaaaaatcaatcattttattgacccaatagatttaggtttaccaggcactttgcctcaagttaatgagttagcagtttacaaggcattattattagctgatgcattaaaaatgaagacagtaacaaataaacttgtttttgatcgaaagcactatttttatcaggacttacctaagggttttcaaatcacccaacaaaattatccttttgctaaaaatggtgtagttaccattaatgttgatgctattgaaaaaccaatttatattgaccggtttcatttggaggaagatactgccaaacaacactttaaccatgaccaaattctgcttgattttaataggtgtggtgcacctttaattgaagttgttactcttcctgttatcaacactgcaaaagaagcgaaagcctacctacagaagttgagacaaattctgattgttaacaatatctccaatgccaaattggaagatggttcaatgcggagcgattgcaatgtttcagtacgtttaaaaggtcaaaggcaactaggaactaaaattgaaattaaaaacatcaactcacttaataatgttgaaaaagcgattgatcttgagattaaccgccaagttaaagcacttattaatggtgaaaccttgagtcaagcaactttaagctttgatgataaaaccaacaacaatgtttttatgagaaaaaaagacaatacgattgactataggtactttattgaacctaacatcatgactagtaatattgatgatttattattagaaaaacctgttgcttttcagttagaacagtttcaaaaagaactaattgatagtaatgtcaatcctcaattagtccaattagtagttgatgatgcaactatctttagtgcttttcaaactattaatagtgtgattaaaaacccccaagaaaccatcaggtggttatgtattgaactaataggtcaactcaataaaaccaacagttcattaacagctaatttaattcaagatctaattaccctaattgaaatgctaaaagcagcaaaggttaaccaaaaacaagctaagcagttaattactttaatgattgaaactaaaaaagatccaaaatcgctagctaagctccataatttagagcaaattactgatccaaaagagttacaaaagatcattaaaaaaatctttcaggaaaatgaaaaagagatcctgaaaaacattgatagaattgaacggattcaaaagttaattattggtcaagttatgcataagaccaataatcgagcaaacccccaacaagtttttataattgttgaaaatatgcttcatgaagttcgggaaagagatagctaaaaaaaatcaaattatttatcgctatataatccttaaaattcaaagctttgaatgacctgctaacacccgtatcttctcagaacgccaactagaaatccgtttcaactcctcacggagtcaaattcgctctgttctcgctacgcttttaaacaaaaatataatccgctacactaaaaatacccctggttattttgtgtgtaaagatgtaggctttagtttttttcataaaacccaggataatctgaaggtgaaatatgctaaactttcaactttgattaaaaagctgttatcacaggatgatgctagtgtttttgccaatattgacagtactgtgcaccttgataaatttaagggaattgaagctaagttttttgatgagaataaaaaacactttttaaacgtttgtttttttgctaaagatgatattttaaacatccttgatgaaaacaacctccagcaacagttcttcagggagtttgcttacaatgggattgctattgaaaaacgtcattgtgttacctctgttgacaaggaaagtgggtgcttggtgatgtatgacatgtattatgatgacaatgataattttgtagttgctagcaaaagtaacttccttaaccctgaattgaaagtaatcaatgcttaaagtgaatgctgattttttaactaaagatcaagttatctatgatttagtgatagtaggtgctggccctgctgggattgctagtgccatttatggtaaacgtgctaacttaaatttagcaattattgaaggaaacactccaggagggaagatagtaaaaactaacattgtggaaaactatcctggttttaaaaccataactggtcctgaattaggtcttgagatgtacaaccacttgttagcatttgaaccagttgttttttataacaacttaatcaaaattgatcatcttaacgatacattcatcttgtatttagataacaaaacgacagtttttagcaaaactgttatctatgcaacagggatggaagagagaaaacttggcattgaaaaggaagattatttttatggtaaagggattagttattgtgctatttgtgatgcggctctttacaaaggtaaaacagttggtgttgtaggaggaggtaattctgcaatacaggaagcaatttatctttcaagtattgctaaaacagttcaccttattcacagacgtgaagtgtttagaagtgatgcattactagttgaaaaattaaaaaaaattagtaatgtagtttttcatttaaatgctactgtaaaacagttaataggtcaagaaaagctccaaactgttaaattggcaagcacagttgataaatcagaaagtgaaattgcaattgattgtctctttccttacataggctttgaaagtaataacaagccagttttagatcttaagcttaatttagatcaaaatggttttattttaggagatgaaaatatgcaaactaacattaagggtttttatgttgctggggattgtagaagtaaatcattccggcaaattgccactgcaattagtgatggggtaacagctgttttaaaggttagggatgacatttagtacacagattaaagctgaactggtccaaaacaaattaattgataaacactgaaatgtctttttagcaggtttttttcaaaacaacttaaagctactttacaaccgtaactgaagttttaaagtgcaatctgaagcattaaaggaacaatttgttcaaaatcttaagtttgactttaagacaaaagctagtaagaaatactttctttttgagtttaatgcagatattaacgtaattaacactcttttaaaacttgatgtgacaactagtgaattggtagttaaacaagtttatctcattgctgcttttttaagtggaggtagtgttagtgatttaataaactccaataactttcacttgcaaatcagttccaacaatgagtttcaaattcaacaacttttaaaattgtttagtttttttaaaaaaacagttaaacaaaaccagttagttgtttatcttaaaagttatgaaaagatctgtaattttttaaaactgattcaagcctttgatggttatcttgcttttgaaaataagcaactagagaaaagttttactttaaaccagttaagaaaaagtaatttggaagttgctaacttaatgaagacaatcagatctaataatcaaactaatcaactccaactaaaatcatttattaaaagtagtagttttgcaaaaagaccgcttaattttcagcgttattgcttaattaaaagtgatcatcctgattgatctttagaacagatagcaaacttttttttcacaaaatataacataaagattagccgcagtggaatccaacattttagtgttaatctaaaaaaactatgccagtagtttaaaattagttcacaagcaatgcatccaatccaaatagtaatgttcattatggctgttatctgtttaattattggacttttgctttctaaccatggttctactggaggattagcttctctatcaggtcaggacttggagatctttcgtaaaaccaaagataggggttttgtaaagatcttacagattatcatgtttatcttagtagttttatttttaattcttgggttgatatttagttttgcaccaagataacaatgaaggttttaactgaactccaaaagcagatatttaccattgtcaaaaaggaaaatggtaaacctattccccctggaatagtggtaagaatgatggaaaatagtcctaattttccaggtaaacatctcatctatcgggccattgatgatctgcttgattgagccatcttaaggaaagctggtggggttacaaaccagctattagttaactatgaacctgctgagcctttacttgataaaaaactacaagggattttaaccttaggaaataagaatagtggttttatccgctctttggatgatgataaaactgtgtattatgtccattactctaatttaactggagctttagatggggatcttgtggagttttgtaaattagataaaccccaatttggtgataagtttgatgctgcagttattactattctaaaaagagcaagaatcttgtatgcaggtaattttttagtagatcaaaatgagtttgccttggaatacaaaattgttgctgataaccctagattttatttaactatgattgtaaatcctgattctatcccaaataacttagcatctaacaccaagatagcttttcaaattgatgagtatgatcctgataacaacttatgtaaggtttctgtacaacaagttttgggtaacaatgatgatccgctaattaatataaaagcaatcatgttggacaattccattgtctttgaaactaacgatgtagttgaacagcatgctaacaagttaagttttgatactgaagaacaacataaagcttaccgtcaggatttaactgatttagcttttgtgactgttgatcctacaacatcaaaagaccttgatgatgctatttatgtcaaaacaataccaacaggttttgtgctttatgtagctattgctgatgttgcacactatgttaatagaaatagtgaaatagacattgaagcaaaacacaaaacaagctcaatctatctacctggtcattatgttgtgcccatgctacctgagcaattgtcaaatcagctctgttctttaaatccagcacaaaaacgttatgttgttgtttgtgagattagttttgataatcagggaaggattaaaacaaacaagctttacccagcaacaattatttccaaaaatcgttttagctatgatcaggttaacaagtggttaaataataaatcagaattaaactgtgatgaaacagttatcaacagcttaaaagcagcttttacactaagtgatctaattcaagcgcaacgtcaaaaacgcggtacaattgatctttcacacaaagaaactgagatagttgttgatgaacattattttcccattaagataaattttttggttcacgataaagctgaaaccatgattgaaaatctcatggtagtggccaatgagacagttgcttgggtgttaactaacaacaaaattgctttaccatacagagttcacccaagaccaagcaaaaagaagttacaaagtttgattgaaacagttggtgagttgaacataactaaaccccaatttaacttagatactgtcacttcaagccaaatagctagctgattaaatgaaaacaaagataatcctagttatgagatctttgtaatcctcttattaagaacactaggcaaagctttttatagtgttaatcccctgatgcacttcagcattggttctaaccactatacccactttacttcaccgattagaaggtatatagatctaaccattcacaggttgttgtgaatgcatctttttactcccgatcaattcactgataatgaaagagatcaactcaaacaagagttggaaaaaattgctgatacagttaatgatacagagattaaaattatcaattgtgaaagaaatgccaatgattatctaacaacgctgttattatcaaaacaaattggcaaaaccttcagcggatttatttcagcaattactagctttggaatttttatgagaatggatgaaaataactttgatgggttaatcaaaattacaactatccctgatgatttctttatttttgaaaaggaaaaaatggtattgaaaggaagaaaaactaataaggtttataaaattggcgatcgtttggaagctaaactaagtgagattgatttcatccaaaaacgtgctattttaacactcatataattagccaatggttgttaatatcctgctttttattacccttatttttttacttttactgtttgtttttttaattgcttttgcatttctaaacaaacgggttagaaattatgttgtacgtacttgaactagtgttttcagtaagtccaaacaaaaccttgataaaaagaacttttttgacaatttaacttcaactttattaagactttcagttgataaaattggggctattattgccattgaaaaacgtgattcacttgaaccttatatcaacattggttatcgggttagttctgatttttcccctgaactgttagttactattttttacaacaaatcatctcctttacatgatggagcggtgattgttagagattacaaaattattagtgtctcttcttactttccaatgacaagacaattaattgatgtttcatatggttcaagacacagaagtgccttgggattaagtgaaaagtctgatgcagttgtttttattgttagtgaaacaactggtaaaatatcagttgctttaaaaggggttattaaaaccttgtcttccaactcagataggttgcaagatgaaattatccattacttgtcttcaaagtaggattaatcacttttcattctggttttttaaaccatggattcaaagggttaattctttggtaaaaaaagcgtccctgtaagtgatcaaattcatgctgtaaacacattccaaatagtccagttgctttaatggtaatctcttttttttcaaaccaatcataacctttaatagtgatccattcactacgaattacataacctttgtgctgctttttaacacttaaacacccctcaccactttctaaaaatgctttattttcactttgatcaataattttaggattgatcagtaggcactttttttctttgtttaaatcattgaggtggatgtaaaacagttgttttcaatagccaatctggttagcagctatcccaattcctggaataatgtcatattcttgtgctttaccatcatatgaagcatcaacatatgcaatcatctttttaatacaggtttcaatttgctcatctattggaaaattaacagcttcagttggcttgttaatcaaagcattatcatcaaaaacaagccaagttttagttggttgaaaagtcattgataaaaacagtaaagttaaaattattctaacaattgaagtgaacaatcaggggagaatttttgtcattactggtcctagcggtgttggcaaaagcacccttgttaaagccttattagatcatttcaaagaacaactgttctacagtatctctgcaactacaagaaaaaagcgcattagtgaaaaagagggaattgattatttttttaaagataaagatgagtttgaaaacttaataaaacaagatgctttcattgaatgggcttgctataataaccattattatggaacgctcaagtctcaagctgaacaagcaattaaaagcggaattaatttaatgcttgaaattgagtatcaaggtgctttacaggttaaaagtaaatatcctcataacgttgttttaattttcattaaaccaccttcaatgcaagagttgttaaaacgtttaaaaaagcgtaatgatgaagatgaaaccacaattaaaaaacgtttagaacaagctaagatagagtttcaacagattgataattttaagtatgttgtcactaacaaagagtttgataaaacccttaatgagttgaaatcaatcttactatctgagtttatttaatgcaagctgctaatgatcatttctttaccggtttatcaaaaaaaggtcctgtaagaaaggaaaatcaggacttttatggatttagttttaatcaaaataacctactaatagttgtttgtgatggtcttggtggttataagggtggcaagattgctagtaacttagtaggtaaactctttcttagtttatttgaaggttttgaatttaaccagtgagatgaaactacagttaaaaagtggtttgaaaatactttaatacaagcacgctttcaactagaaaattgttttcaaacagtttatgaagcacaaatccagtttgctaggatggctagcaccttggtcttgggaattttaactaaaagtgatatttatatcttttgaattggtgattccagagcttacttattatttgaaaaccaagctaagttagttactaaggatcacaatctttataaccagttagttgctatgaatgctgatgagaaattacttttaagttattctaatcaacttttagcattaacaaatactatttccaaagaaacaaaaagaccattagtttatggtttttataacacaaaaattgaacaacaagaatttttattattgtgttctgatggactttataactttgttgaaaaagagcttttttttgaaattatcactaattctaaaaacctaaaacaagcagtgtttaatctttatagaaaaagtattgaaaatgcaagtaatgataatattactgctgcccttgttaatctgcaaaaatggaagcaatcttaaagataggtgatattgttgaaaataagtatcaaattgaaaagcttttaaataggggtgggatggattcctatctttttttagcaaaaaatttgaacttaaaaaactatggaccagttcaaaaaaaacagtatggacacttagttttaaaggtggttcaaaaaaatcctaagattaatgaaaataattggaaaaagttccttgatgaaatggtaaccacaactagagtgcaccattctaacctagtgaaaagttttgatgtggtgaacccttttttgaaaatagttcgtggtaataaaacaattgctctcaatcagatagtgatgattgcaatggagtatgttgatggcccttctttaagacaattgcttaacagaaaaggctactttagtgttagcgaagtagtttattactttacaaagatagtaaaagccattgattatctccacagtttcaagcaccaaattatccaccgtgatcttaaacctgaaaacatcttatttactagtgatttaactgatattaaactattagattttggcattgcttcaacagtagttaaagttgctgaaaaaaccgaagttttaactgatgaaaattcactgtttggcacagttagttatatgattcctgatgttttggaaagcacagttaataaagctggtaaaaaggttagaaaaccacccaatgcccagtatgatatctactcgttaggaattattctatttgagatgttagttggtagagttccatttaacaagtcaattaaccccaacaaggaaagagaaacaatccaaaaagcacgcaattttgacttacctttaatgcaagcaactagaagtgatatcccaaatagcttagaaaatattgcttttcgttgtactgctgtgaaaagagaaaacaataagtgactttacagttccacaaaagaacttttagaagatttggcgaattgagaaaatgaacaagcgatgattaaacctgctaatgaaagggttttagaagggcaggtggaaattagagaaatgatgcttgaaaagcccttagcttggtatttcaaaacttgagccttatcaatctttactatcgtttttatagggttaattattgctgcaatagttcttttattaatttttaatgccagattctaactttgggatagtgcttcagtcattagcaaaacaatgcaaagtattttggaataaccagataataactgcttttcctcaaaagaagttacagtgaaaaaatgattttaagttgatggttggtgatagggttcaacttgaagatggtgcgatcactaaagttttagctagaaaaaatgaacttacaagaccaagggttgctaatgttgatcagattgttttaatccaatcactagttcaacctaagattaactgaattcaactgttgaaattattggtatatttcaatgctaaattaattgatgaaatacctattttaataacaaaaacagaccttgattttgatccaatggaaaaacaaaagttaatcgatttaaaacagtttaactatcagttattttttgtttctaaaaatgaaccactaccttcagaattaatcgatatttttagtaaaaaactaagtgtttttacaggtcaatctggtgttggtaaatctagcttaattaatcgtttagatccttctttaaaacaaaagattcaagccttatcagttaataaatttggtaagaataccactactaaaacaacacttttttcatttagaggcggttttatttgtgacacccctggttttaatgtaatttctattaaaaacctcaaaattttagcagcccaacactttgttggttttcagaaaatgattagtaagtgtcatttttctaactgttatcatcagtatgaaaaagattgctttgtaaccacaagtgttatgaaaaacagatatccttcgtgattgtatgagaagtatagaaaaatgattaattaaaatcaactgcaaaagtgtttatgagtgataaattattaacaattgacttaagtcatgtttatggatttgataaagaaattatttttaagaaataccaaaaaaaagtagatcaaattcaccaagattttctagctcataaacttgctgatggtcacatgactgggtggtatgaccaacctgatcaaaaccaccaattccttttaaaaaccattaatcaaattgacaaaaagtttaaaagtttaaaagtaactgacattgtttatgttggtattggtggttcttttactggtattaaaacagttttagatttcttaaaaccaaaacaaagaacaggattaaaaatccactttgtccctgacctttctgcttttcaagctgcaagtgttattaaggaaattaaaaataaatcatgggctctaattaccacttctaagtctggtagaaccctagaaccagcactgaatttccgcatttttagaaacttattaaacaagcgttatggcaacaaacactaccaaagagtagttgttattactgatgaaaaaaagggattactaaccaaaatggcatcaaatcatggttaccaaaagttagttattgattcaaatatcggtgggcgtttttcaactctatctcctgctggtttgttactagccaaactttttggtcatgatcctaaggccatcttaaaaggaacattacaagccaaaaaggatttgcaaacaacttcacttgaaaacaattctgcatacctttatgcagtagttagacattgactatacaccacaaaaaaattcaaaattgaagtttgcattgcttatcacagtttgtatgaatatttgttattacagcatcgacaactttttggtgaatcagaaggtaagaacgataaatctttatttcctactttttcgatttttactgttgacttacactcaatgggacaactctatcaagaaggggaaaaagtgttttttgaaacagtaattgatgttaaaaatccacttgttaatattaatttacctccatctgattttgacaatgatgatgaacttgatttcttgttagataaaagcttaaatgagatttcagatgttgcaattgattcagttattaaagcgcactaccaagcaaatgtaagcattattaaattaactttaaaagaacaatctgcatttatgtttggttatttttacttttgactctctgttgctacagtgatgagtggatcattattagggcataatgtctttaatcaacctggcgttgaagtttataaaaagttaatgtttgaaaaactaagaagtggccactaaggttgttttttcactcttaccacttttaaataggtttgacaagtcacttttagaaagttactttcaagatggattgaggttaatccattatgatgtgatggaccaatttgttcataatactgcttttaaaggtgaatatttggatgaattgaaaacaataggttttgatgttaatgtccatttaatggtggaacagatcatccctcaaataaatttttatctttcacaacctaatgtgaaaaggatttcgtttcatgttgaaccatttagttttgcaaagattaaagaactaatccaactagttaaagaaaatggtaaagaagttggtcttgcttttaaatttacaaccaatttacaactataccaaccattttttacaaccatcgactttatcactttaatgagtgttcctcctggtaaaggtggtcaagcttttaacgaagctgtttttacaaatttaaagattgctaaccattacaacttgaaaattgagattgatggtgggattaaagttaataacattgatcaaattaaagcctttgttgatttcattgtaatgggaagtggctttataaaattagagcagtggcaacgtcaaaaattgttgcaaacaatctaattaaactttattgatgaaatcagttacagtcaagcagttactacaaaccccacgaaaatttaataacaagcagattaaactatcaggttgggttaaaaataaacgtgctagtgctaacatcatctttctagcaattagtgatggctctagtattaataccctacaagcagtagtaaaacaagaagataacccccaggttttctcactgttacaaactgttaatttagcaagtgctgttatggtttgaggggaaattatcttaaccccaaaagctaaacaaccactggagttgaaattaaagcaggtgagtttattagcacaagcagagtctgattatccactgcaaaaaaaagaacatagtcaagagttttttagaagtaatgcgcatctaagagtaagagcaaaaacttactttgcagtgatgaaaataaggagtgttttgtcacacgcaatctttgaatacttctttaaaaatgattttatcttagtgcaaagccctattttaactagtaatgattgtgagggagcgggggaaacatttgtaattaaagatagtgaaactttttttaataaaacgacttttttaacagtaagtggccagtttggagcagaagcttttgcgcaagcatttaaaaaggttttcacctttggtcctactttcagagctgaaaaatcccatactaatcgtcatcttagtgagttttggatgatcgaacctgaaattgcatttgctaacttaaaagatttaatgcagttaatacaaaacctaattaaattcttaattaaaaaagtgatggaaaatgctagtgatgaactaaatgttttagcaaagcaatttagcaatgacattattagcaacttaaagacaatcattagtactaaaaaatttccaatcattgaatacagcaaagcattagcgattctaaaggaatctagtgatacaaaaaaaactaattttgaactaaacgactttagttttggtattgacttaaaaacagaacatgaacgctttttgtgcgaacaatattttcaaaatcaaccgctttttgttattaactatccaaaggagttaaaggcattttacatgaaaacaaatactgacaataaaactgttgctgcagttgatcttttattaccaaagattggtgagatttgtgggggaagtgaaagggaaagtgatttaaaccaacttaagaataggtgtcaatctttaaacattgacacaaaaagtttgaactgatatcttgatatgaggaaatggggttattttgctagtgcaggttttggtttgggctttgatagattattagcttatatatgtggattggaaaacatcagagatgctattccctttccccgtgtacatggcaccattaacttctaaattcgctgcttataaaaaaaagattgcaaactggttaacagtttacagaatttttattgctttacctactattatttttattgctttagataatcaactaggagttttagctaacttttctgttggtgcaattagcattagtttacagatcagtttattgattggaggatttttgtttttaactgcagttatatcagattatttagatggatatttagcaagaaaatggctagcagtttctaactttggtaaattatgagaccccattgctgataaagtgattatcaatggtgttcttattgcactagcgattaatggatattttcactttagcttattaattgtttttatagtccgtgatcttgtgttggatggaatgcggatttatgcttatgagaaaaaggtggttattgctgctaactgacttggaaaatgaaaaactatcatgcagatggttggtattgtttttagttgttttgtttggagttttaaacaaagtgaaatagcttctttgaatagtggactgttcttttgattactaactcaactgccatattatttagcagcagttttttcaatttggtctttcattgtttataacatccaaatatatcagcaactaaaggcttataactccaagttataatccttattaggcattggaataactttgtttgccaatttaatagcagaaaaactccaaaagttacaacttagtgttgcaacagctgaatcagttactggtggcttattagctcattgtttaacttccattgatggtgcttctaactattttaatggcggtgttattgcttacaataaccaagttaagattaacttactgaatgttcaatcctccacaattgcaaaccatggggcagtttccagtttctgtgctagggagatggcagttggggttaaacaaaagtttcaagctgatgtgggtattgcttgcagtgggatagcaggtagtaaagcagttgaaaataaagcaataggattactttttttctgtattattataggaaataaggcttatgattttgagtttgaaatgaaccaaaataatcgtaaggataacattgaattatttaccaataagatcttggaatctttccactatttgttaacaaagctagcttaatctaagttatgaaacgtactttaaatataggtattgttttgtgtgaaaattttctttcagaccaacaaaatgctgttgatagttacacccaagtttatgaagatgttaggatgtttgaatttgggttaaaactctttcaatcattaccttttaacatccaagaaacccttatattttgtaatgctgaacaacataaaatagttgataaagctgctaaaaaatacaaaaacactactgtgtttttttcacgtgatactgatgtagctaatgtttatgaagctaaggtatttatccaagaaaaatacaaattaacccaagattacaaaaaaagaggtgttagctcttattatgacagctgttgctttatcttaattgaagcgaatcgtccattaactgcaataaagacagttaaaagtgtttatgaaaaagcactgatagaaaaagcagctattgcagtattaccatataatggtacactaatgaatggtaacaatgatgttgtctttagccacttgcaagataaaaataggtttaactattgaaaacaaagcaaggcttatgaagtacaatacccccaagcatatactttaaataaacttaatcagttttcaaaacagcaatttctaagggctagaagtatgttggacttaatgaagatttctaataaatcacccttaagtattgttgatggtagtgcttatgcttttagggttgttaccaaccttgattttgaaattttattaggtattttaaaaaatggataaaaatatttttcaattagtacaaagttttgctaaaacgcaaaatgtgcgagctaattacacctcacaagacaaaaatattagtttagattttgttagttttgaaacagttagtcaatcactaacaggttttctaatttttaataatttcaataaattgttacaactaattgaactgataaaacaaaagcaaacatgattatatgtagatcagctctgaattgttgatctttccaataacaaagccttaactgatgctactgtttggattattaaacaagaaaaattgcctgtttcagttgcggcttttagcaaccaacaactcaaccaagtttatcgcaattcatccacaagtcctttgtatcttagttatgtcaaaccaatcgaagttcaacaattttttacactttctccatccattaacaataatccttttttaaatcaaaatcctttaactgaatcaccatttgataacaataatcagctgtttcaagcaacaaagagcgttgaaccttcaatggaaacaatggaattttcccggtttatggatgaatttgatcagattacaaagaacttttctgatatagagcttgaacctatgcaattcacccaaagttttgatgattggagcaaagactagggttgcaatagttggcgggattggttacataggtagttgttttgctagttttatcaaagaacaaaatgataagctaattgttactgttattgataacaacaaaaataaccatgtaattaaactcttaaaaaagattggaattgaattctattttgctgatttactagatagacataagctaactgaagtaattgcagcaattcaacctgatgtggtatttcactttgctgctaaaacaagtgtaagtgaatcagtacataatccattgaagtactttgattgcaatgtaattggtactttaaacctaattagtgcaattagtaacttacagaagccaattaaattatttttcgcttctagtgctgcagtgtatggtcaaacaactaatagttacattagtgaagagattgtaataactgaaacacaagcaaccaatccttatggattgagtaagtttttagatgaattaatcttaaatgcagttgccaaaaatagtcaactacaagttgtttgcttacgcttttttaatgtggcaggtgcaattctgccatttggtaattttaatggtaataccacgcttttaattcctaacttagtaaaagcctttttaaaacaaactcccttttttttatatggcaatgattatgcaactaaggatggtagttgcataagagattacatccatgtttatgatatatgtaatgctcatttcttattatgaaagtggttaaatgatcatcgccaaattaaatttgaaacctttaacttggggagtgggataggaacttctaatttagaagttattgatattgctaaaaaagtgttttatcctagtagattaaatttagaaattagaccaaaaagaagctgagatccagcaattttagtagcaaatgttgctaaagcaaaacaaacctttcaattcaaaataacgcgtaatttgaaagatatgataagtgatgagcgtaatttttatgagaatttttataatgacgcttattaagtggtgtttaattaatggaaaaagttgccttcaaaatggagcatatctccaaaagttttgacaatggcaaaattaaggctaatgttgatgttagcttagttgtttatgaaaatactgtccacaccattttgggggagaatggtgcaggaaaatcaaccctgacttcgattttatttggtttatataaacctgatagtggcaagatctttattggtgaaaagcaagtaaattttaaatcttctaaagatgcagtaaaacataaaatcggaatggtgcaccagcactttaagttaatagaaaactacacggttttagataacatcattctagggaatgaaagtaggtttgggtttttacctttaattaatcgtaaagtaagtgaagcaaagattaaaaccatcatggaaaaatatggaatctttgttgatcttaaacaaaaagttagtaacttaacagtaggtcagcaacaacgggttgagatcctaaaggttttatttcgtgatagtaatatccttatctttgatgaacccactgcagttttaagtgatcttgaaattcaaaactttctcaagattattgctaactttaaaaagctaggaaaaacaattgttttaatctctcataaattaaatgaaattaaacaagttgctgatacagctactgtcttaagacttggcaaggtagttggtagttttgatgttaaaacaacaccagttgataagattgcgcttttaatgatgggcaaagagttaaaacaaactaaaaacaccacagattttgttgctaaagatgaacctgttttaaaagttcaaaacctgaatttgtttctcaataaatctttagcatacaagttcttagtgaggtgcaataacatccataaagcccaacaaattaagaaaaataaaccattaaaagacttatggataattagttttttaaataaactaaccaccagtaacaaaacccctaaattagtaaaaggcttgattaataagttaggactttcctatcaagaaaatacagatgaaaccattagttttgctatccataagggagaaatttttgctattgctggggttgagggtaatggtcaaagtcagcttgttaatttaatttgtggaattgaaaaagctgctagtaataagttaatttttaacaatattgatatctcaagatgatcaattagaaaacggattaatgctgggattagttttgttttggaagatagacataaatatggcttgatcttagatcaaaccgtgaggtttaatacggttaataaccagattaataaccgtccttttagtagttgaaactttttaaaaccaatggagattgctctttatagcaacactattattaaaaagtttgatgttaggggcagtgctgagggtagtgctgttgtaagaagactttcaggtggtaatcaacagaaactaattattggtcgagaaatgaccaaacaaaatgaccttttggtgttagcacaagtaaccagaggccttgatattggtgctattgcttttatccatgaaaacatcttattagctaaagctaataataaagctatcttattggtttcatatgaacttgatgagatcttagcacttgctgatacagtggctgttatcaataaggggagaatagttggtatgggaaaaagagatttaatggatcgccaatcgataggtagattaataatgcaataaaagactatgacaatgtggcaatttaaaagttactttaaacaccacctggtgttttgaaaagaccgatttttacatagctctgagaaacaaatgcaaagaagaagtatcctctcttcagtggttttgataatcctctcttttcttatatcgtttttactgattatttcaattcctggaggtagaggtgcgagcttctttgcactgtttactaagttatttttagataacactaatactgaaaatttcttaagacagattgctatttatatcctagctggattagcatttagtttctgtatgagtgttggtattttcaacattggtatctcagggcagatgatggctggagccatctttgggtttttaatgattctcaaggtgtttccaagttcatttcgacctggttttggaggtcagattattactgtattattgatggtaataggtagtgttagtgtggcagttgttgttgcaactttaaagatttttttcaaggttaatgaagttgtaagtgcaattatgttgaactgaattgtagtgcttattagtgcttatttagtagagacttacattaaagataatagtgggggtacagcccaattcttttccttaccactccctgatgaatttgctttatataacttctctcctttaacaaaaaagtttggttgattagcttcacttattattgctttcattagtgttattattgtggcagtagtattaaaatacacagtttttggacacaaattaaagtcaattggcagtagtgtatttggttctcaggcaatgggttttaatgttagaaaataccagttcttatcgtttattatctcaggaattttatcaggactattagcaacggttgtttacactgcatcaactgaaaaagtattgacatttaacaatgttggggatagtgctatttcagcagtaccagctactggttttgatgggattgcgattggtttaattgctttaaataacccctttaggattgttattgtttctgttcttattgcttttgttaacattggggcaagacctgctaatttaaaccctaatactgctagtttagttttaggaatcatgatgtattttgctgcactttataacctaatggtttactttaaaccatgaagatacctagtgaagctgaacattggaaagataaatctcaccacatatgaaacatatgaaaacaaactagctgctaacctagagtgactaagtttccaacgcttcttgtcaaaacagaaaaaaaagaatgacaaaactaaatttaattggtttgatactagtttatttgaacaatatgcaaaaaacaaacaagaaattgttcaagaataccatcacaattgtgcaactaatttaattgcttggtgattgaatgcaatccaaagtggcaatattaaaccttcaactacttttaagttggaatttgttaattttaaacaccaacagaagtttgtattaaattggtttaaaaatgaaagtgaatcactgcgtgatttccaatcacagtttgagagaatcaataagttagtggaaagggagtttgttaagtaacaatgttaagtttagcacaattagaaagttggttttttatcgctccagcactgcttttagcagtattgagtggttatctcgctgaacgcgttgggatcattaatattgctattaatggtggaatggtgtttggtgggttatttatggcactcttatcgtatggatttacaaataacttaaatcaatccgctccctcctgatcactatttatcaccattcccttatcagttttatttagtagtgttataggttgtttatttgcactagcagcagttaagttaagagcagatcatgttattgtgggaactgggattaacttgttggctagcggaattaccctttttattagtcagaatgctgctagtttgttttccgatactaccttaagagtaaggtacttatttcccatccaaactactgttagtatagaagcaattggtgtgtttgtttttagtttacttctgattgggtttgtatggtacttgatgagttttactaaaactgggttgagataccgtgcggtaggtgagaatcctaatgtaattgatacccaagggattagtgtttacaaataccaatggataggcgcaatttgttcaatgatggtagctggattgagtggtagtttgtttgttttaagtgtttctaactttccctttaacagcggagatgtaaatggcttgggttttattgctattgccattatgattatctcaatgtgaagaattatccctagcatctttattgggttaatctttgcatatgcctatgtttttaccaatagtcaaataggatctaatagtaattcctacttgttaagaacgatccctttcatcatctcattactagtaatgttgttatttggttttcttaatgttgccccaaaaaatataggtaaacattttgacaagggtttaagataaacaaaaaccttatttatagttaagtaagtagttttattaatgattaaaaacctggtggtgattgaatcacccaataaagttaaaacattaaaacaatatcttcctagtgatgaatttgagatagtctcaaccgttggtcacatcagagaaatggtgtataaaaactttggttttgatgaaaatacctatacccctatctgagaagattgaactaaaaataaacagaaaaatcccaaacagaaacacctgctcagtaagtttgagatcatcaaatcaatcaaagctaaagctagtgatgcacaaaacatttttttagcttctgaccctgatagagaaggggaagccatctcttggcatgtctatgatttattggatcaaaaagataaagctaagtgcaaacgaatcactttcaatgagatcactaaaaaagcagtagtagatgcattaaaacaaccgcgtaacatcgatcttaactgggttgaaagtcagtttgcccgccaaatccttgacaggatgataggttttagattatcaagattattaaatagttatctgcaagcaaagtctgcaggtagagttcaatcagtggctttgcgctttcttgaggaaagagaaaaggagatagctaagtttgttccgcgtttttggtggacagttgatgttttattaaacaaagaaaataaccaaaaagtagtttgtgcaaacaagtctattcctttggttttaagagaaattaaccctgaattaagtgctagtttaaaactggattttgaagctgctgaaaacgtatcaggaattgactttttaaatgaagcttcagcaaccagatttgccaaccaactgactggcgaatatgaagtttattttattgatgaacctaagatttactattcatctccaaacccagtttataccaccgcttcacttcaaaaggatgcaattaataagttaggatggtcttccaaaaaagtaacaatggtggcccaaagactgtatgaagggattagtgttaatgggaaacaaactgcattaattagttatccaagaactgattcaattaggatttcaaaccaatttcaatcagagtgtgaaaagtacattgaaaaggagtttggaagtcattatttagctgataaaaataagttaaaaagacataaaaaggatgagaaaatcatccaagatgcccatgaagggatccatcctacttacattactattacccccaatgatctgaaaaacggggtgaaacgcgatgagtttctcctttatcgtttaatatggattagaacagttgctagtttaatggcagatgctaaaacatcaagaactattgttcgttttataaaccaaaaaaacaagttttatacctcttcaaaatcacttttatttgatggttatcaaaggttatatgaagagattaaacctaatactaaagatgaactttacattgatcttagtaagcttaaaattggtgataaatttagttttgaaaagatcagcgttaatgagcataaaaccaacccaccaccacgttacacccaagctagtttaattgaagagcttgaaaaatctaacatcggtcgtccctctacttataacactatggccagtgttaatctagaaaggggctatgctaacttagtgaaccgatttttttatatcactgagcttggtgaaaaagttaataatgaactttccaagcattttgggaatgtaattaataaagaatttaccaagaagatggaaaaatctttggatgaaattgctgaaaacaaagtaaactatcaagaatttcttaagcagttttgaacaaattttaaatctgatgttaaactagctgaaaattcaattcaaaaagtgaaaaaggaaaaagaattggttgaaagagattgtcctaaatgtaatcaaccgttggtatatcgttacaccaaaagaggtaatgagaagtttgttggttgtagtgattttcctaagtgtaaatacagtgagtttagtaatcctaaaccaaaactaaccttggaaacacttgatgaattgtgtcctgagtgtaacaataaactggttaagaggagaactaaatttaacgctaaaaagacctttataggttgcagtaatttccctaactgccgttttatcaaaaaggataatgctgctgaatttaaacaataacagcgttcttattgttgcgtttgtaattgtttctttattctttctaataattgttgggtttgctttaaatttagcaattgctttttcactccatttaaagcagaataaaaataacaaaaaatacatcttaaatgaccaacagatccagttaagattaactgaaaaacaagcccaattaacaactttacttaacttttatcaacaaaaaattgaaagtgtaaacagagaaaaaagttggttagaaagtcagttacaggtaattgataaaaaggatttaaagcaagcgcaaaagttaactttacatttaaaaaaagaccaaatattagctcaacttaatgaaaagctgattcaaaaaaaagttgatcagcctttagttaatgaactacagaaaaccaaactttcctatcttgaaaggttagttgatcaaaagattaaactcagtgaaaataatttcaaaagtgcttttcttaaaacgaaggtaaaagagacagcatttaatatctttgcagctaaaaacaaggtgaactgggagtattttaaacaggtgtgtgatgctgattgcactttaaaaaacttagaagatgaagtggaaattactttttctaattggagttatttgagaaggatgcaagctctattagcgtttgaaaaactaattagcaaaatcaaaacagtcaaaattaatgaattggttattaatgaaactttagatgaagtgaaaaacgaaattagccaaactgcttttcaagcgggtgaaaaaatagttaaggaatttcagataactaatttaaacgagcaaattaccagactaattggcttgcaaaaatactattttggcactgatcagctcaatctcttagaactcgcggtattaacaaccaaattagtaattttactgaacaaaaagttcaaactagatttagatttagaacttcttaaagcagctagcttgtttaactatttaaagtgagtagataataaccagttctttcaaatattaaacacaaaacttaaccagcttttaattagtgatcaagttattgcaatcatccaacaacaagaacttagtttttatcctgatcagtatgggatgttaattaatggagtgaaaacaatgattagagagcataacaccattgattttgaaaaactggtttttctcaactcaacaaaacttattgataatttttatctctatgatttaaatatgatccatgcagttgaatataacaactgcttttattactttgttagtgttaaaccctttgagattaagtcattagcagaacttgatctttttgttgttttgttaaaaacttttttagctaaaaagcaaaagcaaaatccaaaagcggttaaactgtttatcactaccaaaattttagcgatctaattacattagattttattagaattgtttcaactaataaattggccttatggtaacagaaattagaagtcttaaacaacttgaagagatcttttcagctaagaaaaatgttattgttgacttttgagcagcatgatgtggtccttgtaaactaaccagccctgagtttcaaaaagcagcagatgaatttagtgatgctcagtttgttaaggttaatgttgatgatcatactgatatagcagcagcttataacattacctctttaccaactattgttgtttttgaaaacggggttgaaaaaaagagagccattggctttatgccaaaaaccaaaattattgatcttttcaataactaaagtccatgattgatctgcttggtttggatctggatggaacgttattatctaaaactaaaaaaattaacaatccatcaaaattagcattaactaatttaattgctaaaaaaccaagtttaaaggtgatgattttaactggtagatcagttttttctactctaaaacacgttgaaaagctgaacagtttgtttaaaaaaccaattgttgattatttttgttgttatgggggtgctaaactttatcaaattgaagcaaataagccacaagaaagatacaagttttgcttggaaaacagtgttgttgaaactacctttagtattatcaaaaaacaccgcggattatgtttagcttacttagatagttatgtctctccttacctttgtttagctggtaacaagctccttgggtggttcactaaatacttttggtatagaaaaaggtgtgtgttttttaaccagaaccatttaaaacaaggtattctaaagattagtgtttactttttaagtgcaaaaaggtgtaaaaaagtttatgaaatcttaaaaaatacctttcaagaaaaggttaatgttttaagtttttctaataatttaattgagataactcatcatgatgctaataagggttatgcaattgaatatatggccaaaagagaacaactttcacttaatagaatagcagttattggtgattcttgaaatgattatgcaatgttcaaaaaagctaaatattcctttgcaatgtcaaaatccccttcccagttaaaattaattgctaccaataccagtaacaaaaccaaccgttaccgctttagtaccttacttaatttaattagtgaaacaatcattaatcaaaaagctgattagatgttaaaccaaatgctttataaaacatttttaatgtttcatcagcaacttttttagcttggtttttaccatcatttaggacttttaataccatttcatcagtaatttgtgcttttttaaatttaagtgattctatgacattaataacagcactactgaggtcattctttaaatctaaataacttttattctgataatatttaacaagatcagagccgatttttttacttaaattatggttaacttcttcttttaaaagtgcagttaaaataacaagtaaattagtaacaccaggttgggtttttttagcaaaacgaatcttattaaaactatcagttgtggctttgcgcacttttttgatgattgtttctttactatcatccagatagataacaccattttgatcaggatttgatttggacatcttttttaaaggatttgatagatccatgatcctgttggtatctttgttttctataaatacaggtaatttcagttttaacttaaatttttttgctacacgtttagctaaatcattggttaattccaagtgctgcttctgatcattaccaactggaacaatatcaggttgataaagcaagatatcagcagccattaacactgggtaagttaacaaaccagttgggatagtaatggtgttattactatttcttttttgcgctaatttctttgttttaaattgggtcattctttgtaattcacctagattactttgtgtcagcattagataacctaacatggtatgttccatcagatcactttgtaaaaataagttcacttttccataatcaagtcctagtgctaataaagttttaacaagttgcaagttgttatctttgagcattgttggttcaaaatcaacagtaatagcatgaagatcagcaacaaataaaaacagttggtattgactttggagttgttttaaaccttgcattacgccaagaaagttacctaggtgttgtcttccagaagcttgaatccctgtaattgcgcgctttatcattattagaattgatagggtaattaaaggttattttaatgaaaaaagcgggtaaaaaaaatagtgatgcaggtaagacttttatcttaatctcatcatcctgttcatcctgtcagaaagccattgagttttttgatcaaaacaaaattagctatgttgttgagaatttttataaaaaaccaattagtgataagcgttttaaagatattttaagtcttagtgaggatggtactgaaagtttgttttccaaacgtgctgatcagattaaagcaactaacagtgttagtgttgaagagttgagtatcagtgaattaattaagctagttagagaacgtccttctttactaagaaggcctattatcatccaatataattcttcaggaattcctaaaaggatgcgaattggttataactcatctgaaattaaggtctttgagcgtaaactaatagaaccaaagcctataatacaacaataacatctaaatgaaatacaaaatttttgcttccacaacgccccaaactgaacctgttctcaataagttaagagcagttttaaaaacttggcaagcggttgagaatggttatgaatatgtgtttgttttaggtggggatggtttttttgtttccacacttgctaactataactgtgatagttgtaaggtagttggtatcaatactggccacattggtttttacacttcttttaatggagatgatcttgatgaaaatttcatttcaaaactaactagctttgagtttaaaaagattaatttactggaagtgaaaactaaaaaccacagtttcttagttttaaatgaacttgcagtttacaccaacactgcatatccaattaacatctttattgatgataaccactgggaatcataccgcggttcagggttgctaattggcccaagaacaggttcaactgccctagcaaaatctgctaagggagcggttatctttccaaatgttgatgttgttcaaattattgaactaaaccccttattacatcccaaccaaatcacaattcaatctccgattattctgccaatgcaaaccaaggttgaatttaggatcaaaaaagcttttaaagcagagcaatttcccaatttttatgcagatggaatcaagcttgatttaaaaaatgaagataccagtattagctttcagttggttttatcaagatcaatgtttcacgcttctttaaaaactaaggattttattgataaactaaaatcaacttttattaagcaaagctaatgaaatggttgttgtgattgggttatatttttagttttggtttactctatctttggatagtaaaaaaatcaaaacaaattgctcaacaacctaacacaaaactggttgaatcaacttctattccttttaaagttaaggactttgttagtgcttgtggtggtaaggaaaattttgttaatataaaaacaacaccaactcaattaatagttacttttaaagatgttaactcagtgagcttaacaaagcttaatgcgcttaatatcaaaggaattaacaaaaaccaaaaccaatttcgttttgtacttggtaactttgtaaatgaattgaaaaaaaagatagaagatgaacaataacattactaacagtattgcccaattgtttttcaacacttctttctttgcttttctgtttttaatcattattgcgtttaatttatgcttgtttgcctatctttattttcagtaccgaatttataagaaaaaccctaaaaaagctaacaactttaaagcgaatgaatatgaaaaaattaagctattaaaaaaccaaaatttcactgaaagtaataaattaattgcaacaactaatgagttaaatgaacttactagtcagctagataatatcttggttaggattatcaacaaaccactagcaaagttagttaatgattttttagatgaacagattaaacagatagttaagctagataaaaacagttctgattttcactcagaaagtgataacctccctttttataccaaactctttaatgattttcactttggtgttgataaattaataaacattaacataaaaaaccctctttataactgggtttatagccccagttttttaattagtgaaagtgattttcgcaagcttaatggtattagtggtatcaataaaaagcttttggttgaaaaacttagaattgaagacattgtgtttacagatctaaacaaaaagtatgaagttaatgtcttgacagaaagtcctattaaagcacaaaaaacagtgttaactgtgcgcaatatcctgatgaacgattatgttgataatgaaaggattgaatcatatgtccaacaagctaacttcttttttactgagcactgtaaaaagatcggtaaagagatcttagaatcacttaatatttttatctcaagtagttcactacaccgtcattttggctttttagcatttcgctattcatttggacaaaatgtcttatcccatagccttgaaactgcatttttaactgcccacttagcagctttaatagaacttgatagtgaactgagtttaaagtgtggattgctccatgatattggtaaatctaatgatgataatggtaaagagagccatacgattacaggcgctaaactcgctgagcaatttcaactacctgatgacattaaatacacaattgctaaccaccacaataaacatattgacaatacctattgtcgtttaacacaaattgctgataaactatctgctgctagaattggtgctagaagtgatagttcgcttctttttaaacaactaaaagatgagttgaaaaagattgttgataaaactattaataattttcatacaacgatcttactaggtcaaagtggtagaaggttaatgatttgacttgaaactaaaaaccaaaatcaactgttaagtaatgagcaaattattgaaatggttgaaaagattaaagctgaaattgctaagaatccaattacaaatcacttccctattaaagttgtaattagatataactttgaacacagttttaacaccaaaagctaaggatgcaatacagtgctttaataccactttttatattactaattagcttagtattattttgtttcagctttagaaaaaatcaaagtgaaaatcagatagtgaaaatcttattttttgcttattgcatcgattttttagctttaattcttgctgtaatgttgctcacttttttaagtcatgggttgttaagtttagcgattttaatccctgtcttagtttttcaataataatgttttttgttatggttattagtcactatccccttatgaaaagactatttggaaattaaaattctaagtaccatggagttgaaaacccctaactttaagctaattgatgaaaagattgctgaatttaataagagtaatgaaaacctgattgtaaaactacttcaaaaagaaaaggaatttgccacaaaccaagttactgttcagtttgatactcagtcaaaaaagtcagaagaagtgaaaaaacctagtaaaaaaatactgaaaagttatcactttctaacagtagttatggcagttaatttgctaataactgttggtttgatagttggcttaatttttgctttcagatattagttggtagttttcttctaaggaacgtttgttggttttattgacattatagccaaaccctttaccagtttcatatttgggtactatgtgtaagtgaaaatgaaaaaccacttgacctgcaattgccccttcattagaaacatagtttaaaccagatggttttagtgtcatctttagttttaaagcgatttgttttgctaataaactaactgcttgtaactctttttgatcagttgaagaaaaatcaactgcatgttttttagggattactaaagtatgaccatcagctacaggaaaagcatctaaaaaagcaatggcatgctcattttctccaattttataggatgtaattgaaccttgaacaatatcacaaaagatacaactacttgtggtgtttttttccatagtaatggttatttataacaaaaagcattcataagattaaaaacattgatgcaaaaatagggattgatcaaatccaaacataactgttatatttagtttgcgtaaaaaatccatacactgaataggagttttcaccattatcccaaacatttaaaaatggaatagtttggagataaaaagcatagatactgggataaatgcctgcttttaaaagaaaggattgcaaattccttggcggtttgataaatttataagttttaaaaagtaatccaacataaataaagtaaaacaacggatggataacatggagtaatagctctgaaaaagcattccagtcattaataaaagaaccattaaaactatatggtaattgcgttgttatagttgaaaaccaaccctgtacatcaggttctatattaacaatacctgtgaagcgtgataaagcataaaagttaaagaaaataactgtaaaaactagataacctgtaacacttaaaaccagtgaactgttttcaaatcatctgcttttatggttaagaaagtagtatcatactaaaaagattgcaaggctattactttggtaagtaaaagtatcaaaattagtaaaccaaatcaggctcatttgaccactgttagcaacactaatcagtgcagtaatcaccataaagatttgggtgaatagtgaaaaaggtgctagaaaaattaaataataatcgcatttattgttaagataaaagcaacggtaaaaaattccaattgattttttaagcacgatttttatttaatgatatatgagttttaaaaagattgctgaaatgatgcgtcaagcagaacgagaaactaagaaaaaaacattagcgtttgaacaacaagcctttgaatacaactataaaaatggtgcgattaagatcactattttaggtgatcttacacttaaatcaattaacatcgatcctgttttgattgatgcaagtgacaaagttattctagaggagatgattatagaagctactaatgaagcggttagtgatgtgaaaaccaagtatgataacttagttgagaaaactatgccaaaagttccaggtcttttctaattagattttcttttttaataaagatcttatcctttttcatttccataaatgtagggatattagcaaagagtgtcattagtaaaattgcaacataacttaaactaaagcccacaataaacacaagttgtggatcactattgcttaagttaagaaaggtcgccacatttttatattcaccattagttcaatcacttgctaagataccagttgtattacctgtgatctggcccttaaacacagataccatcaaagctacataactaaagtaaattagagcaaacacatggatatagaaaaatgagattaaagaaaaacagttatcccacaagataattgctaagcttacaagtaaactgagaaaatgcatcatgaaataaatctggttatttcctgtaccaacaaagatgaaattcacaatatcttgttcattaacaggtgtaaaaattagttcaccaaaaagagtaaccaaagctccaaataacccaaaaacagctaacaccccactaatctttttttgctttaaaaagacaaacactggcgcaataacagcaaaaaatggacaaagatctaataaaaatatcctacttagtcgtagtgaatctaaattttgtgaagattgggaattttgtccataaacatcagggaataaataaataatctgcctaccaaaaaaaacatagacaaacagtacaatggctagtacttgaattagatagaacctaatctttagttttcgaactaaaggagtaaaagctaaaacagaaattacaccagcaataataaggatgatgacaaggtagttaagtgtctgcattacttattgcttaaaattaagataaataattttccaattttgttttcaatgagtgatcgtttaaatgatcaagcccaacatcgcttgcagaaacttttaaggttaaaacaaactaataatgacccttatttagtaacaaaaactagtctaacccattcttcaaaaagctttcaagttgaatttgaaaaatgttcagaagaagagttgaagaaaaaagcaactgtctcactagctggaaggatcattgctattagacaaacctttttaattattcaagattttgatggtcaagtccaactttacatcaataaaaaaatccatcctaagttatttgattactttaatgaatttgttgatattggtgatcaaattgttgttagtggtaagccaatgttaactaaaacaaaggtattaactttagctgttgaagagatgaaaatcattgctaagtgtttattggttccacctgaaaagtgacatggacttactgatattgaaacccgcgctcgcaagcgctttcttgatcttacctataacttagcaatgcgtgatgtttttctgaaacgcactaagattattaaatcaatccgtagctttcttgatcaaaatggttttattgaagttgaaacccccactttacaagctgttttaggaggagctaatgctaaaccctttaaaacccattacaatgctttaaaagcggatttttatctcagaattgctaatgaaatagcattaaaaaaactcattattggtggatttaacaaggtttatgaaatgggtaaaatgttccgtaatgaaggggttgatactacccacaatcctgagtttaccagtattgaaatatatcaagcttatgcagattttgaagtcatgcttgtgcttgttgaaaagctgattcaatcactttgtgaaagcttaaaccaatttagctttaactgaaataacaaaacgattaatctaaaaacaccatttcataagataacaatggttgaacttattaagaaagttacagggatcgattttaattcagtaaaagatgatcaatctgccattttattagcagaaaaacatcatgttaaactagcaaaacaccaacaaaataagcaacacatcattaatttgttttttgaacagttttgtgaacaaacattaattgaacctacctttgtaacccattatccaaaagcagtttctcctttagcaaaacaagatccttcaaatcctgaattcacccaacgatttgaactttttattaatggtaaagagattgctaatgcttacagtgagctaaacgatcctttagaacaaagaaaaaggtttgaacaacaacttgaagaaaaacagcttggtaatgatgagacaagtgaacttgatgaatcgtttttagaagcattaagttttgggatggtaaacactgctgggcttgggataggtattgatcgtttggtaatgttgttatgtgaatgtaattctatccgtgatgttgttttcttcccccagttgcgtgaacataaatagttttgatattttaattgttggtgctggtattagtggaatagtactagctaacatcttagctaatcacaataaaagggttttaattgttgaaaaaagagatcatattggtggtaactgttatgataaagttgatagtaaaactcaactcttgtttcaccagtatggaccccatattttccatactaacaaccaaactgttattaactttatctcacccttctttgaactaaataactaccaccatcgggttggtttaaaattgaaaaataacctagatttaaccttaccctttgattttcaacagatctataaactaatgggaaaagatggtagaaaactcgttagtttttttaaagaaaatttcagtttaaatactcatctatcattagcagaattacaactaattgataatcctttagcacaaaaactctatcagtttttaattagtaatgtttataaaccatacagtgtcaaaatgtggggtttaccatttgcaatgattaatgagaatgttattaacagggtcaagatagttttaagtgaacaaagcagttattttcctgatgcaattatccagggattacctaaatcaggttatacaaacagttttcttaagatgttagccaatcccttaattgatgtgcagttaaactgcaaagataaccttttagtttatcaagatgaaaaactgttttttaacaataacttaatagaaaaaccagttgtttactgtggcttaattgacaagctatttaacttttgctttggtcatttgcaataccgttctcttgcctttagttgaaaaagatttaaccaaaaaaaataccaaacctaccctgttgttaatatgcctttagctaaatcaatcacaaggagtgtggaatacaaacaactaacaaaccaaggttctttcaaaccgcaaaccatcgttagttttgaaacccctggcagctatgcaattaacgatcctaggtttaatgaaccttattacccaattaacaatacactaaatgatactctttttaaaaagtactgaaaaaaagcaagtaagttaaagaatctacaccttttgggaagattagcaacctaccaatacattgatatggataaagcaatcctacttagtattaaaaaagcccaacaactgttaagttaatggaacaaaaaaacattagaaatttttctattattgcccatattgatcatggtaaatctaccttatcagaccgcttgttagaacatagtttaggctttgaaaaaagactattacaagcgcaaatgcttgatactatggagattgaaagagaaaggggtattaccattaaattaaatgctgttgaattgaaaattaatgttgataacaacaactatctttttcatttaattgacacccctgggcatgttgattttacttatgaagtgtctcgttctttagcagcttgtgagggagttttattgttagtagatgcaacccaaggaattcaagcacaaacgatttccaatgcttatcttgcgttggaaaataacctggaaattatcccagttattaacaagatagatatggataatgctgatattgaaacaacaaaagattcactccataacttattaggagttgaaaagaacagtatctgtttagtatctgcaaaagctaacttagggattgatcagttaattcaaacaattatagctaagatccccccaccaaaaggagaaattaatagacctttaaaagcattactctttgatagttactatgatccttacaagggggttgtttgttttattagggtatttgatggttgtttaaaggttaatgataaggttcgttttattaaaagtaattctgtttaccaaattgtggaactaggggttaaaaccccattttttgaaaaaagagatcaattgcaagcaggagatgttggttggttttcagcagggataaaaaaacttcgtgatgttggggttggtgatactattgttagttttgatgatcaatttacaaaacccctagcaggttataaaaagatcttacccatgatctattgtggtttatatccagttgataacagtgattatcaaaacctcaagttagcgatggaaaagatcataatcagtgatgcagcattggaatatgaatatgaaacatcccaagcgttaggttttggggttaggtgtggttttctaggtcttttacatatggatgttattaaagaaagattggaaagagaatacaacctaaaactcatctcagctcccccttcagttgtatataaggtgttgttaacaaatggtaaagagattagtattgacaatccctctttgttaccagaacgctccaagattaaagcaatcagtgaaccatttgtaaaagtctttattgatttacctgatcaatatttgggcagtgttattgatttatgccaaaacttcaggggtcaatatgaaagtttaaatgagattgatatcaacagaaaaagaatctgttatctgatgcctttaggggaaattatctacagtttttttgataagttaaagtcgattagtaagggttatgcatcgttaaactatgagttttataactaccaacatagtcaactggaaaaagttgagatcatgttaaacaaacaaaagattgatgcattatcttttatcagtcataaagactttgcttttaagcgggcaaaaaagttttgcactaagctcaaagaattgattcccaagcatctgtttgagatccctatccaagcaacaatagggagtaaagtaatagcaagagagacaatcaaagcagttagaaaggatgtaatagctaaactttatggaggggatgttagtagaaaaaagaagttattagagaagcaaaaagagggtaaaaaacgcttgaaagcagttgggagtgttcaattaccccaagagctatttagtcatttgctgaaagatgaagattaacatttttataatttgttattcttttgtattggttgatactttaacaaagtattcacaataaaatttcaacactaatataaacaatgataaaggattttaatcctggtgattttattggtaaaaaaccaactaaaatctatgcttttggtggtatccaagaagttggtaaaaacatgtatgggattgaatatgatgatgaaatcatcattattgactgtggcattaaatttgctagtgatgatctacttggcatcaatgggattatccctagttttgaacacttaattgaaaaccaaagtaaggttaaagcattgtttattacccatggtcatgaagaccatattgggggtgtaccataccttttaaagcaggttgatattcctgttatctacgcaccaaggatcgcagcatcattaatcttgaaaaaggttaatgagcacaaggatgctaagctcaataagatagttacttttgatgattttagtgagtttcaaaccaaacacttcaaaattgatttttaccgggtaaaccactcgattcccgatgcttttggaatctgtgtgcaaacccctaatggcaacattgttcaaagcggtgactaccggtttgattttgctgctgggagtgagatgttagatgttcataaagtagtgaaaattgccgagcgcaatgtccatgtttttatgagtgaatctactaatgctgaagtaccaggtttttcccaaagtgaaaagttaatttacagaaacatccaaaagatcttaaaagaagcaaggggtagggttattttaactacttttgcatctaacatcacacggattaatgaaattattgagattgctttaaacaacaaacgcaagatctgtttattgggtaaatcaatggatgttaatgttaatatttcacgcaaaattggattgatggcaattgatagtaatgatattgtggaagttcgtgatatcaaaaactatcctgatcgtaatatcttaatcttgtgcactggttcacaaggtgaggaggctgctgctttaaacacaatggcacgtggtaagcataattgggtgagcttaaaatcaactgacaccattattatgtcttcaaatccaattccaggtaattatgctgcagttgaaaacttgcttaatgaactctctaagtttggtgttgctatttatgaaaattcatcccaactaaaactacatgcctcaggtcatgccactcaacaagagttacagttgatgctaaatttaatgtttcctaaatacttaattcctatccatggtgaatttaagatgatgcgaaccataaaaaacattgctaatgaatgtggcattaaaagcgaggatgtggcgcttttaagtaatggccaagtaatgtatttaattgatgaagaactttattattccaatgaaattattaatgctgatcctatttatatagagagtcataactcttctcctgatcttgcaagaataattaagcaaagacaaatccttagtcgtgatgggatgtttgctgttattgttgtttttgataagaataataacatcattgggattccaaccttaataacaaggggttgtttctttgcacttgattccaatcctttaatgacaaagatagcccattctgttaaaagaactttagaaagtgttatccaaagtaagaagtttaatagtcatgaacaactaacaaaggaattgaaacgagtttgtaaggaaactgtttcttactttatctgaaaaaataaaaaccgtaatcccttaatttcaactgtgctttcctggatctaattcccccaacctctattttctgttactagtgccaaaagtggtattagagtaccacaacctgaataaccaagtagtcaaagagagtttggaagtggaagcaacccaatcatccttcaaccccacccaaaggttgaagagtgggagtccaatgaaggatacaggaaagatgggggagaaactcagtgaaacaactgcttcatccatgagtggtatggctacatccactcgagccaaggcccttaagatagaggtggaaagggggagtaatgtcaatcaaggcgaactacaatccaacgactttgccaaaaagccgtttaaagatgagagcaataagaagttggattcacagaaggagtttccccaaggaaaggtttgaaaaccggtgttgagtacagatgagataacaagagagagggggatgggggcgacttagactttctcccctgaatcggcaatggtaaacccttctccaactccccctccccttcaacttctgcttcctcaacccccctccccactttttctaacatcaatgttggggttaaatcaatgatcactcaacatttaaataaagaaaacacccggtgggtgtttatacctaacttttcacctgacatctgaacaggagcaggttatagaaaagctaataacaacaataacggcattccttttgaacaggtgaaacctagcaatagtagtaccccctttaatcccacctcagctggtggctcctcagccaaaaaaacaaccacctattcctttttacccaattccatcagtcccaccagtgactggatcaacgcattgactttcactaataagaataacccgcaacgaaatcaactgttgttaagagcactgttaggaactattccggtcttgatcaataagagtggggatagtaatgatcaatttaacaaggatagtgagcagaaatgggataaaacgaatgaaaaagatgggaatttacctgggtttggggaggtgaatggtggtttttataagatttttacttatttaatagttaaaaaagttttgaatttttcttagttttttatttgtttaatatttaagaaagtctcaaatttttatcagtttattggtcaaagaagtcgcaaatttttcttagttttttatttgcttaatggttaaaaaagcgttagtttttacctttatttaattaataaaaacattaaacttcgccacccccatcaccgattctaaaagtgatctggttagtttggcacaacttgattcttcctatcaaatctccgaccaaaccatccataacaccaacttgtttgtgttgttcaagtccaaggatgtgaagcttacatatagttcaagtggctcaaataaccagattagttttgattcaactagtcaagctaacaaacccgcctacatcgttgaatttactaattccaccaacattggcatcaagtgaagggtagtgaaaaaatatcagttagatgtaccgaatgtttcaacaaccatgaacgaagttttgcaagaattgatcctagaacaacctttgactaagtataccttaaacagtagtttggccaaagagaagggtaagacacaagtagcggtacatctgggtagtgggcaagcaaatcagtgaaccagtcaacgcaaccaacatgacctaaacaacaatcccagtcccaatgcttcaactgggtttaaactcactaccggcaatgcgtatagaaaattggatcaatcctgaccaatttaccaaccaattgatgggaccaagcagggcaaagggaaggatagtagtgggtggaatagtgaagaaaacgaagctaaaagtgatgcgcccctaagtacaggagggggtgcttcttctggaacatttaataaatacctcaacaccaagcaagcgttagagagcatcggcatcttgtttgatggggatggaatgaggaatgtggttacccaactctattatgcttctaccagcaagctagcagtcaccaacaaccacattgtcgtgatgggtaacagctttctacccagcttgtggtactgggtggtggagcggagtgcacaggaaaatgcaagtaacaaacccacctggtttgctaataccaatttagactgaggggaagacaaacaaaaacaatttgttgagaaccagttggggtataaggaaactaccagtaccaattcccacaacttccattccaaatctttcacccaacttgcatatctgatcagtggcattgacagtgtcaatgatcaaatcatcttcagtggctttaaagcggggagtgtggggtatgatagtagtagtagtagtagtagtagtagtagtagtagtagtagtagtagtaccaaagaccaagcacttgcttgatcaacaacaactagcttagatagtaaaacggggtataaggatctagtgaccaacgacacgggattaaatggtccaatcaatgggagtttttcaatccaagacaccttctcattcgttgttccttattcggggaatcatagtaatcaaatttcatcaggaaccattaaaactgcttatcctgtgaaaaaagatcaaaaatcaactgtcaagatcaattccttgatcaacgctacgccgttgaatagttatggggatttaaacattaaataaagagaattcacccaaattatttacttatttattaactattgttacccaatttttctctttttatttgttgtttttttactaattaaataagcagtctttcttacaaaaaagaaaaattcatatataatctttgcgctgttaacacctttgttaacgccaaaaatgttctttcaaaactggatgcaatctgtcaattttttctgagagtttgatcctggctcaggattaacgctggcggcatgcctaatacatgcaagtcgatcggaagtagcaatactttagaggcgaacgggtgagtaacacgtatccaatctaccttataatgggggataactagttgaaaaactagctaataccgcataagaactttagttcgcatgaattaaagttgaaaggacctgcaagggttcgttatttgatgagggtgcgccatatcagctagttggtagggtaatggcctaccaaggcaatgacgtgtagctatgctgagaagtagaatagccacaatgggactgagacacggcccatactcctacgggaggcagcagtagggaatttttcacaatgagcgaaagcttgatggagcaatgccgcgtgaacgatgaaggtctttttgattgtaaagttcttttatttgggaagaatgactctagcaggcaatggctggagtttgactgtaccactttgaataagtgacgactaactatgtgccagcagtcgcggtaatacataggtcgcaagcgttatccggatttattgggcgtaaagcaagcgcaggcggattgaaaagtctggtgttaaaggcagctgcttaacagttgtatgcattggaaactatcagtctagagtgtggtagggagttttggaatttcatgtggagcggtgaaatgcgtagatatatgaaggaacaccagtggcgaaggcgaaaacttaggccattactgacgcttaggcttgaaagtgtggggagcaaataggattagataccctagtagtccacaccgtaaacgatagatactagctgtcggagcgatcccttcggtagtgaagttaacacattaagtatctcgcctgggtagtacattcgcaagaatgaaactcaaacggaattgacggggacccgcacaagtggtggagcatgttgcttaattcgacggtacacgaaaaaccttacctagacttgacatccttggcaaagttatggaaacataatggaggttaaccgagtgacaggtggtgcatggttgtcgtcagctcgtgtcgtgagatgttgggttaagtcccgcaacgagcgcaacccttatcgttagttacattgtttaacgagactgctaatgtaaattggaggaaggaagggatgacgtcaaatcatcatgccccttatgtctagggctgcaaacgtgctacaatggccaatacaaacagtagccaacttgtaaaagtgagcaaatctgaaaagttggtctcagttcggattgagggctgcaattcgtcctcatgaagctggaatcactagtaatcgcgaatcagctatgtcgcggtgaatacgttctcgggtcttgtacacaccgcccgtcaaactatgaaagctggtaatatttaaaaacgtgttgctaacctttattggaagcgcatgtcaaggatagcaccggtgattggagttaagtcgtaacaaggtacccctacgagaacgtgggggtggatcacctcctttcaaatggagtttttattttttatttatcttaaacacccattaattttttcggtgttaaaacccaaatcaatgtttggtctcacaactaacacatttggtcagtttgtatccagttctgaaagaatgtttttgaacagttctttcaaaactgaaaacgacaatctttctagttccaaaaataaataccaaaggatcaatacaataagttactaagggcttatggtggatgccttggcactaaaaggcgatgaaggacgtgttaacctgcgataagcttcggggaggtggtaaaaacctgagatccggaggtgtccgaatggagcaatctggtagcttgcaaaagttaccattaattaatgaattcatagttaattaaagcgatacgtggtgaagtgaaacatctcagtaaccacaggaaaagaaaacgaatgtgattccgtgtgtagtggcgagcgaaagcggaacaggccaaacctatctgaggataggggttgtagggcttgcattatggaagttaaaaggatagaagaagctgttggaaagcagcgccaaagagggtgatagccccgtatttgaaatctttttaatacctagcaagaaacctgagtagctcgaaaaacgttattttgagtgaatctgcccagaccattgggtaagcctaaatactaattagtgaccgatagcgaaacagtaccgtgagggaaaggtgaaaagaacccagagatgggagtgaaatagattctgaaaccatatgcctacaacgtgtcagagcacattaatgtgtgatggcgtgcgttttgaagtatgagccggcgagttatgatagcaagcgttagttaaccaggagatggggagctgtagcgaaagcgagttttaagagagcgtttgtttgttatcatagacccgaaacgggttgagctagtcatgagcaggttgaaggttgagtaacattaactggaggaccgaaccgactctcgttgaaacgatagcggatgacttgtgattaggggtgaaattccaatcgaaatccgtgatagctggttctcgtcgaaatagctttaaggctagcgtaagatcacaaataagtggaggtaaagctactgaatgtatgatggcgccacctaggcgtactgaatacaattaaactctgaatgccatttattttattcttgcagtcagacagtgggggataagcttcattgtcaagaggggaagagcccagatcattaaataaggtccccaaaatatactaagtggaaaaggatgtgaaagtgctaaaacagcaaggatgttggcttagaagcagccatcgtttaaagagtgcgtaacagctcacttgtcgagtgtttttgcgccgaagatgtaacggggctaagtatattaccgaatttatggataagatatttttatcttgtggtagacgagcgttgtattggagttgaagtcaaagcgtgagcattggtggatccaatacaagtgagaatgccggcgtgagtaacgcttgggagtgagaatctcccaaaccgattgactaaggtttcctggaccagggtcgtccttccagggttagtctggacctaagctgaggctgaagagcgtaggcgatggacaacaggttaatattcctgtacttacagttagactgatggagtgacaaagaaggttatccacccccattattggatttggggataaaccataaggtggtacaataggcaaatccgttgtgcataacactgagtggtgatgtcgagtgaacgagtgatcaagtagcgaaggtggcaattaatcatgctttcaagaaaagctgctagggctaatttaactgtaaccagtaccgagaacgaacacacgtagtcaaggagaggatcctaaggttagcgagtgaactatagccaaggaactctgcaaattaaccccgtaagttagcgagaaggggtgcttatctaaaagtaagccgcagtgaagaacgaggggggactgtttaactaaaacacaactctatgccaaaccgtaaggtgatgtatatggggtgacacctgcccagtgctggaaggttaaagaaggaggttagcaatttattgcaaagcttttaactgaagccccagtgaacggcggccgtaactataacggtcctaaggtagcgaaattcctagtcgggtaaattccgtcccgcttgaatggtgtaaccatctcttgactgtctcggctatagactcggtgaaatccaggtacgggtgaagacacccgttaggcgcaacgggacggaaagaccccgtgaagctttactgtagcttaatattgatcaaaacaccaccatgtagagaataggtaggagcaattgatgcaagttcgcaaggatttgttgatgtgaaatgtggaatactacccttggttatgttttgttctaattggtaactgtgatccagtttcaagacagtgttaggtgggcagtttgactggggcggtcgcctcctaaaaggtaacggaggcgcacaaaggtaccttcagtacggttggaaatcgtatttagagtgtaatggtataagggtgcttgactgtgagacttacaggtcgaacaggtgagaaatcaggtcatagtgatccggtggttcagtatggaatggccatcgctcaacggataaaagctactccggggataacaggctgatactgcccaagagttcatatcgacggcagtgtttggcacctcgatgtcgactcatctcatcctcgagctgaagcaggttcgaagggttcggctgttcgccgattaaagagatacgtgagttgggttcaaaccgtcgtgagacaggttggtccctatctattgtgcccacaggaagattgaagagctttgcttctagtacgagaggaccggagcgaggacaccgcttatgctccagttgtagcgccagctgcaccgctgggtagtaacgtgtctattagataaacgctgaaagcatctaagtgtgaaactatctcaaagattaatcttcccatttctgttaaaggaaagtaagagccgttatagaccatgacgttgataggttacaggtgtaagcatagtgatatgttgagctgagtaatactaattgctcgaggacttattggttgataaaaggtatttatcaactaaaagattgtcgtttttgtttggtgctaatatcgctgtggaaacacctggaaccatcccgaacccagcagttaagcacagtggagctaaatgtaggtagtaatactgagaataggtaagcaccaagcaaaaattaaggactataggtttaaaaacctatggtctttttttatttaatgaatagtttttataactaatttatctaaaaaaatcgaacaacctttgactaagtatacgctcaatggcagtttggccaaagagaagggcaaaagccagatagaggtgcatctgggtagtgggcaagcaactaattgatccactcaacgcgccactccattggtctgaatgacaatcccagcccaaatgcttcaactgggtttaaactcactaccggcaacgcttatagaaaattggatcaatcctgaccaatttatcaactaattgatgggaccaagcagggcaaagggaaggatagtaatgggtggaatagtgaagaaaatacggcagcaggggatgcgcctcttgtttcaacaagtggaggtggttcttctggaacatttaataaatacctcaacaccaaacaagcgttagaaaggatcggcatcttgtttgaaagtaatggagaggcgaggaatgtggttagcctccttccaactctaccaacccaacaaggtgaaggcttaccaaaccactaacacctacaacaggttaattgaacctgacaagtgacaatcaagtagtgatttgaacaatatgaccaacttgttaaaactcctaacaactaaaaacatcaaagcgaaattggggaaggacacccaatcaatgggaaataataatggagggggtgttagtcaaaccttttcctttgttgttccttattcaatgaatcatacaaatacgggaactagtggaaccattaaaactgcttatccagtgaaaaaagatgaagcttcccaagtagcgatcaattccttgatcaacgctacgccattgaatagttaaaaacctgatttatttttatagaaacagttactttgaagattcactactaataatttaaattaagcactcatactaatatattaatccctttagattgcttaactctttaaaacttccctttataatcaaatatcgccatgaacgactgacagtgactgaaaaacagacttgttaattccaaaaccaaatctgttagtttctgattaccacaaacctcaagtaatatcattgatattgctgaattaattaagtgctgtagtgagttaaaaaacacttctattaatggtttaattgactttttgaaccaacaggataaacttgaatttaacttaacaagattaaaggagatagatgttgaagatggtaagcaactatttgggatagaaactagtgtttataaacactttcaaaatgaaattgctcgtttttataaacaagtaaacaaacactttcgtgaaacaggtagtgaaagtttgtttttagctttaccagttattgaagggattaatgagtttaacgatatctttcgagctccattactttatgttggagttaaactcaaagtttccccacgctttgaacgtttctgattagaaattaacaaagaagagatctttttaaaccctactattattggagttgaaaccaacaaacgtaatagtttgtttaaaaataactatgatactactaagatagatgttaatgatgctttaaaggtatttagtgaacttgaatatgagtttagaatgcctttaacttctgaattgaagagttttagtaaaaaagcaaagagtgattttaatactgaaaaacgaactaactatcttattaacaacgttcttttggggatctttgatgttaagggtgatcagctgttccaaaactttaatgagattctaaacactgatcctgatgtattagatgaacttctaaaagatagaagagatctgttgttagaaaaccgggaattccgtgaacaatttgatttaaaagatacctatctcttcagtcaccttgatatctaccaacagtatgcagttaagcaagctttacttggtgatttaattattgaaggcccacctggcacagggaaatctgaaacaattgttaatatcttagttaaccttgttttaaacaacaaaaaagtattgtttgtttctgaaaaagtaactgcacttgatgttgtttacaaccgtcttggtagttttaaacacatcgcacttttcaacgctagtgttgctgctgaaaagaaacgcttttataaccagtttgctgagtttgaaacttatttcactacttacttttccaagaaagatttggatgctactttaccaacatttgaaggtaaatgggtggatgatattttaggggcatttcaagcattacaagctctttatgacaccaagataaattctggtgaaaatctgtttagtttcaaagagattgtcagtagctttcagatgttggatgctagttacatcaagattaaagaatatgaacgttttgatgagtgagtgcgcgtcttttcaaatccattgtgattagaaaaacacttaagttaccaagagttgaaaaaagaacttagtcagcgctggaatggtattgataatttctatcagttgcaatcgcttctaaaccaaaccaaaaaacgaaaggtcttaaactatgtgttggaacactttgaacagtttaatacagttatcagtcctaagcatgttttgttctacaagcctagcaataaatcacaattgctcttaaaacaactgaaacaggatgttgaacaatacactagtttacaacgtttccaatctcctactaagtttgaaacaatcaagttgaatttcatcaaccaagttaatgaaaacccaaccccatggttcttttcttgatttatccaatttcatgccaagccactgttggaaaaactcgttagttttgagtcaaacattattaaaacaaaacaagcttatcttaatgggattgaaagctatgtagcaagttgtaagaaactgcttaaaacaactattttaaacaacttttttcagctttatcaaactaataaagatgaactattggagatctgcagacaagcaaaaaacccagttttaaaagagattacttggtggtttaaaaaacattttgaactcttaaaaaaactctttccagtgcacattatgacccttgagtctgcagcaactctaacccctaaccaacgtggtttgtatgactatgtggttattgatgaagctagtcaagtatttctagaaagagcaattcctatcttatttagagctgataagtacattattgcaggggacactaaacagttaaaaccagctaacttcttccaatcacgtgctgagtatgatgttgatgaggagtttgaagatggcaatatagaagctgctgttcactccagttctctacttcattttttaaagaaccgttcaagaatcttaactttacttaagttccactaccgcagtgattcagctgatctgattgcttttactaataacaggatctatgacaatgaattaatctttatgaataaagctaatgctgatcaaagggtttttattgtccatgatgtaatagatggtatctgaaaaaacaaccggaatctccaagaagcacgtgatgttgtgcaacgcttagaacaactaacaacaaccaatgattacaaaaagtcacttggtgtaatttgtttcaataaaaaccaagcagatctaattgaatatctaattgataaacaaaacaatccattacttaacgagtgaagagaaagacaaaatgatgttggtgaatatgaaggattatttgtgaaaaacattgaaaatgtgcagggtgatgaaagggatatcatcatcttttctttaggttatgatcgttcagtaaatagttatggtcctattagtaagcaaggtggagaaaacagactaaatgtagcgataactagagctaaacaaagaatagaactgtttaagacaaatagaggagaagactacaatggtttaagctccagttccttgggtagtaaactgttagttgaatatctgctttattgtgaagcgatggctaaaaaccagggtgagaaaatcacttttcaagcggtaaaaagaaaagaaacaaaagcaaagtatgaactggcagttgaaaatgatttcttcaaccaactgcaggcaatttttggtggagagtttgagattaaacgtaacgttaatgaaggggcttactttttctcatttgtcttttactttaataatatcccttatcttgccattgactttaacatccccattcccacttcaagaaaacaagttatggaagggattttataccgtgaacagtttctcaaaaaacgtcaatggaacctaattaacatctggattgatgagtgaaaattaaacccaattggggtgatttctaaaatcagatcaagtttagcagtgcatcaaaaccagcatgaagaaatataattagatgaagataactttcatttctggacaagaagtgtcgttaggcacttcttttttattgttttcaaaaaaaatagttatgaatgaattaaaccaacccttacttgctattattaaaaatgttgctaaaaccaaaaacctttctatagaagaggtggttttttgtttgaaaacagctttagaacaagcctataaaaaacaccttaactttgttaatgttgaagttaacattaactttgataaggggattattaatgttgaacaactctttaatgttgttagtgatgaaaatgaagattatgatgactttcttgaaatccctttacaagcagctaacaaaataaacagttcattgcaattaggtgatgtgttgcgaaaaccaatccccttaaaaaacattagtagtgatcttatcaataagatgattgctatctttaaccaaaagattagtgaaacaaactttaaagcagtaatgagtgagtttagtagtgaggttggggaagtgattgaagcgaaagttgaagatattgatactaacaaagaaggtggtttaaagggttatattattaaccttgaaactacaaagggttatatctccaagcgggaattgtcaaaaggggagcgcttagagataggtaaaaaatacctctttgttatcaaagaaatccaacggcaagcatcgttatgaccaattactttatcaagaagtgatacccgcttactacagtttttgttaacttcaaatactccagaaattgaaaatggtacgattgtaatcaaaaagattgaacgttccccaggagtgaaatcaaagatagcagttatctccaatgatcctgcagttgacccagttgctgctatcttaggacctaagggtgagaagattagggggattagtgaggaatttaatggtgagattattgacattgtcttttggaatgaagacaagttaaagttcttaattaatgccattttacctgcagaagtcattggttataacatcttgcaggatgatgagcgtgatactagtattgaagttgttgtacctgcaaaccaaattgctaatgtttttggttttaaaggtgtaaacattaggttaattagtaatttaacaggttgaaatagtgttgatgtttacagtgaaaaagatgcaagtgaagccaacattaaattcacgaggttaagctttgaacctgaagggttgtttggcatcaaaaaaagaagggaaaagatcattagtaatgatgctactgataaagtcttttacacctctaaagacaatgtgatagatgatgagattattgttgatttagctaaagatctaatggttgataataaacaaaaacaacctgagcaagttgcaaagcaagttgttgaaaaatcacaattagaaaaacaagttactccaaaagaaaaagagaaagttcaaccaaaagctaaggttcattctaatagccattccaaaaaaccagctaaacctaatcagattttttctatcactgttgatgctagtgataagaatcttaaaaaagatcaagttgataataaccaaacaaacccccaaacaaaacaaacatttgatagctttgatgatctttaatgcaactaataacaagactttgtttattaacaagaaaacattttgttaaaagagaacttttacgtcttgtaaaattagacaaccaacttgaaattgatcttaatcaaaatctcaagggcaggggttattatttgagtgtttttggtttaaagctagataaaaaacacctcaaagctgtagttgaaaaacaccttaaggttagttgtaatgatgcaaagcttactgcaatgattaccgccttacaacaattagcacaagatgaaaaaaaatagagctttcaatcaggttaaaaaaacaaagtttgacggtaggattaaaaccagtgccaaacaccagttacgtaatgttaaaaccggggttaaagatggtgtttttatctataaaggtcctttaactgttagtgagtttgcaagtaaaactaatatcgctgttgctaacattatcaaacacttttttttaaatggtttggcactaacagttaattcagttttaacaaatgaacagttagcagatgcatgtgttaactttgggtttgactttaagatggaaactgaagttacccatgaaaatattgtagctaacatccagtttgaagatagtgatgatttattgcaaccaagaccacctattgttactatcatgggtcatgttgaccatggtaaaacttcgcttttagacacaattagaaaaactaatgtaactgctaaggagtttggcggaattacccaaaaaattggtgcttatcaggtgaaaaatcaccaaaataaaacgattacttttattgatactcctgggcatgaagcatttactttaatgcgtgcaaggggtgcaaaagtaactgatattgtggtgttggttgtggcagcggatgatgggattaaaaagcaaacagaggaagcaattagccatgctaagagtgctaacactcctatcattgtttttattaacaagatggataaaccaactgctaaccctgatctggtgatccaacaactcaataagtttgatttagttcctgaggcttggggtgggaaaactatctttgtaatgggtagtgctttaactggtcaagggattaatgagttgcttgataatatcttgttgctaggggaagtggagggttatcaagctaactataatgcccattcatctggttatgcaattgaagtacaaacttcaaagggacttggccctattgccaatgtcattgtaaaaaggggtactttaaagttaggtgacattgtggtgttagggcctgcatatggaagagttagaacgatgcatgatgaaaatggtaatagcttaaaacaagcaaccccttcaaaacctgtgcagatctcagggtttgacattatgcctgttgctggggaaaagttcattgtttttgatgatgagaaggatgcaaagttaattgctaacaagtttaaagaacaacaaaaacaaaaagctaacaacttaacagttaatcaaaccttaaaagaacagattaaaaacaaggaaattaagatattaaatttgatctttaaagcagatagtgatggttcattgcaagctattaaacaagcagttgaaaacattaatgttgctaagatctcacttagtatcatccatgctgcagtggggcagatatcagagagtgatattatgctagcaaaagcatcaggggctttattgtttagtttaaacttaggtttgagtcaaactgtaaaaaacattgctagtttacaaggggtaaaattagaagttcactaccatatccctaaactagcagaggagattgaaaacatcttaaaaggtcaattagatcctgtttatgaagagattgaaataggtaaagcggaagttttacaactctggttccactctaaaatcggtaatattgcaggaaccattgttaaatcaggaaagataaaaagagggaatttatgtaagttattcagagataaagagattatctttgaaggcagaattgactctttaaaaaatgaaaaaacgcctgttaatttaatagaaacagggaagaattgtgggatagttattaatggttgcaatgatattaagattggtgatatcattgttgcttatgaaaagcagatagttaaagatggcaagctatagaaaacaacggattgaaaatgatatcatccgcttaattaatcgcacgattattaatgagatctatgatcctgttgttaagttaggtcatgttagccatgtgaagttatcagctgatttttttcatgcagtagtttatcttgattgttatgatcgtagtcagattcaaactgtagttaatgcttttaaaaaggctcagggcgtttttagtcaaatgttagcacaaaatttgtacctagctaaaagtgtaaaactccactttgtgaaggatgatgcaattgacaatgctttgaaaatagaacagataattaactctttgaaaaactaacagcttgaagtaaaattaatcctaatggacccacaaaacaagtccccaaaaccacaagttaaatcaactagattggttgtcaaaaaacaaccagcaggtgttgtttttcccaaattgagtattcctgttaatgattttgaaaaaacagttactttaacaagagcacaaaaaaaggaagctaaacttctcaaaaaagcccaaaggaaagctaataagcttaataataaacaagatagtacctttttcaattctgcttcaggtgagactaataacaccattcttcctcctggtgttaaaaatcaagctgataataaaactaaccgttttagtaaatttattagttttttcacttcttcaaaaaacaaacaaccagatgaaataacagaaaggttagttgatgatcctactgttaaaaaccgttttagtgcttttaataagaagcttatttgagttctaaaggataaaaaactaagagcaagagcgtggaagattgttggttataccaatttagttattgtggcattttttgctggacttttagcagtgatgaataagttcatcaccctttcctcagttgaatatcctgctattgctttacaactccctattaacaatgcattatgagggatttctatctttgttattagcattgttactttaccgttttgaacaatgtttatcttgtttttaatgggagtaaaggatgtgagaacttcgcgttctatccattattttatctggatagtgttaattattaatgtagttttattactagttagttgcttgttgatgattgctgcttatgcccatcttgatggttataacatctgaagaaacttagaatcacttaaccctaataactaatgaaatcactctttattggttattttgatggattacatcaaggtcatctatttttaaagcagaacagtaagtttgaaccaatggtgttattaattgataacccacctttaaaacaaaccaactggctttatgatttacaacaacgggttgcacaaataaaaacttacttgaaagcaactgtagaagtatttgatgttgccaaacataacatgaatgcacttagtttttttgaacaacagattaaaagattgaattgtgatgaaattattgttggtacagattggcattttggtaatgatcataaggatgggatctggttaaagaaactgtttaaaaatactgttattgttaataaaacaaacctatcaagtagtgttatccgtaactatctaactaataatgaacttgaaaaagctaaccaacttttagtggaaccttattatagagtgggcacagtagtacatggtttaaaaaaggcaaggttgcttggttttccaactgctaacattgttatggataaccacttattgactttaaataaggggagttatatagtaagagttttattaaataaccaaactttttatgggattggttttattagccaaaaggatcaggatttggtgtgtgaaacccatatctttaactttaataatgagatttatggttcactggtcaaatttacactgttaaagttcattagaacaattagtaagttttccagtcaagcagctttgcaaaaagcaattcaaagtgatgctaactttgctttaaagtggttggaaaaccaaaatttagataaaatttaaaatcatccaaatatggacagtgcccccagtggtttaactttaactgttattatccttagcatcattctgcttgcttttatcagcacagttgtatcagcttatgaaacagcaatcacttctttaaccccttacaggtgaaagaactatatcaagactaacaacaagcaagataaactatcaactaagataataaaccactttcaaaaccactattcaagttgtttaattactatcctaattactaacaacatagtggccattatggtttctaacatcctttttttagcactagaacaaacaattaaaaatgagcttttatcaagtgttttaaatttggtagttagtggggttttaatcgtctctttttgtgaaattctacccaaaactttgggcagaattaatgtgattagaaccctggttctatttgcttatttggtttattttttttatctgatcttttgaccaattactaagctaaccagtttaattctcaaaaagtatgaaaaccccttacctgtttcaaggaaagatgtttattattttattgatgaaattgaacaaaacggtttattttccaaagaagatagtttactgattaaaaaaaccttaatctttgaccaagtactagttaaaaaggtaatgatcaagtgaaaaaaagtggcttattgttatcttaatgacagtattaacttgattgccaagcagtttttacaaaggcagttttccagaatgccagtagtagataaaactactaataagatagttggttttatccatttaaaggatttttttacagctaaagaagcaaaccctaagtcacttgatttaaaccagttgctttatccagttgttttagttcaagattccacccccatcaaacaagcactaagacagatgcgtttaaacagagcacatttagcagttgttaatgataaacatgaaaaaacaatagggattgtttctatggaggatattattgaagagttggtgggtgaaatctatgatgaacatgatgatatccaaccgatccaagtattggatgaaaatgtttgacttgttttacctaatgtaaaagcagcctacttttttaataagtgaattaagccagatttggtaaaatcaaaaaatattactatccagcattatctcgcttcactagataatgatagttttgcttgccaaaataagcttgacactcccttatttagtgttgaagtgatagctgatagcgaagataaaaccaaaattctttacgaaattagaaagaagagtgatgttattgcttagagcattatttttagagttgaaaaccaacaaaaattgtaaagctttacttttgttattaatccccttactagttggtttaaccttgataatctatgggattgtcttattttccactgaaggggtaattgaccatggtgatcataaccacttaagagcaaggtttcaactcactttagaggagattattgtttttgttgttggtagtattatcttgttttttactttagctagcttttgtgtgagttgctttatgttaatgagaagtcctaagcaaaaacagctagaggttgatcatgctaataaaactaatttaaaaccaaaagcaatagttaattgtgatctttttcagttgggtgattactgtgtgtttacatttaaaaaacttagctttaaacaacggtttaagcaagatttttttgctagaagtaagttttcgtttcgcagtgaactgtatcgtctttgtttggtgggagtgttaattgctctcaatttagcgttaagtttgattgaaattcctgggatagttttaccttggggtagttcgatccaattccgtttttttaatacggctatcttgtttattgctgttaggttggtgggattattatctacttctttagtggctttaatcaccccctgattacacctgttaatccatcctattcacacccccattagtagtttgttttacatggttaatgactttttggtgctgtggatcttttatttcttttttttccatctctttaaagcagaggtgaaccaaactactactgtagttgacaacaaaccttttagtcagttagttaatactaaaaagacgaagtgaacaaagtttttttccttacttgtaattagctttttgtgtggctttattgaggggttaggtttttactttggttattttttaatccttggtaatgtttctagtttaggattgaagatctattatgatgggttacaacaacgtgatctgattaacagtagtaatgttttgttctttttaatgacaacaactgctatcttcagtattaaatacatctttgagatgttatttttctttagtgttgaaaagaatgtagttaatattgctaaccactttggtttgtattaatctaaactttttgcaactaattaattagttaactaataatgaagtatgtaaaagtacagatcatcaataaatcaactattgaactgttagaggatgctaaaaaaggggaaaaaattaatttagatttaattaaccaagttgatcagaccaacatcctcaatacgatcactactaaccaaaaattagcatgagaaaaggagttaagtgctcaatttatcaatcagcagaatgagttaattaaaaactttgaaattgagatcattaagttaaaaactatgcttaatgacaaagagcaagcattgttgttaaaaaccaaattagaattacaaaaccagtttcaaaagcagatagagaactatatcaatgagattaacaagctcaagttaaccaataaagagcttgaaattactaaccaaaaacaactagaaagctcacttaaactacagcgaaacgaatttgaagagaaaatcaaccagcaaaacttaacgattgaaaaactgaaaattcaacaagcaagaagtagtatctgagcagttgctaaaaaagggaatgaacttgaaaagtggtgtgaaaaccagtatgagtcttatgcagatagctttgaaaactgtcagtttactaggtataaaactgaaattaacttattagatgaaaatgattttcctaatgaaaaagcagattacatctttagtttctttggtgaaaaaaccaataaaattccgtttttatcaatttgctgtgagatgaaaagtgagtttaatgatagtaagcataaatcaaaaaacaaagatcatattagcaaactggtcagggatgctaaacgtgctaactgcaagtatgcttttttaattagtgaacttgaactggagactgaaaatgacatccaagtgcgcttaatgccaacattggaaagtggtgttgaagtctatctagttagaccaatgttttttatcttaatgcttaaacttttctataagttagctaagaagttgtttgcccttaaccgttttcaatcagttgaactaattgataaaaataagttaaatgaacagtttaaacagttgaaagataattttttaaccaaaacctttttagagattgaaaaagtgtgtaaaagtaacttagttgatattgaaacacttgaaaaagcagtggtgaaactaagggttagaaacgaacgcgttttagatcagttacttaataaatgaactaagaaaattgatagctttgatttacagttaactaagaaaattactaataactactagggtttaatttgttagcttatttagaaaaattcaaaataagcaaattataattaggtgtctttctttactaaaaatatgaaattataccgatctttaaaagcagccctgttaccagggatatgcactagcattttacttgctagttgtgcttcaacaaatacttatcaagaccaaaggaatgccttgattagtttggcttctaatcgtgatactttaattgcgaatgctaaaaaatccaaagaagaagtgcaaaaagaagttaccaaaatgaatagtagtacttcatcaatgatgacagctacccaaagtgttgcaattacaacacatcaaactactgaaaaaacaaataattctaagtatgatctagacaagctttttaaggattacatcctttatgttgttgataatttttcaggacttgtttttaaaagaactggcggtcataggatccagttaatcgataaggataaagagattttggatggtggtaatctaactaaacatacccaccacgatcataaccatatgcataatcatgaacatgaacatgaagaacaccatgatgaggaagagacagaagtagttggcagagcactatcttttactaatggcatctttctagtgattgactataaaaaagactctgaaagaaaaaatatgagtggttcaactactatgatgcaccaacaccaccatgaagctgaagaacataaagaggaacgtaagctctctttaaacttaaaagcatacaaatttaataccccttttaacattagtgagtttattagtgcttgacatcataaagaatctcataatagtgacacagagttcaataaccttcacaataagtatgacaaggaagaattggatattattgactataactttgaagaaaaagctgttgatgaaacaattgcttaactaaaaaagatagttattaacttaatttagaattaactaatgacagtgtacacttacactgtttttttatttaattgagaaaatattgggttgatggaacaacaaaaccctgatcgtttaaaaaaagatagggaacttatttatgcaattgttacagctaaaggtatcattagccgtttcttttgatcaatccttagttttttaattactaaccttatcttcttttttgcagcttttgtagcgctcttaatttatctgttagcaagtgttgataatcagtttgcatttgtttttattgctgcaattatcttcattattttttacaacatcttctttttaagttacctgttgtttatctattttaagggccagaaagcaattgaaaacaactgtaagtacctgttaacaatccttgatattaagagtgatgaactgttacctttttcgcttttaggtagtttaagaaaaggttatatgctagatgaaatgctcttagaacagtaaatatttgctacaatcataacgctttagtttttagttgatacaccaaaatccgtagtcaatttattaactaactagtgaactagattttgatgaatagcgctgtaaaatatcctgagctgaagatcaaacttgagtcttatgatagcacccttttagatctcactattaaaaagatagttgaggttgtaaagggtgtgaacattaagattaaaggtcctttacctttgcctactaaaaaggaagtgatcaccattatccgctctccccatgttgataaagcatccagagagcagtttgaaaaaaatacccacaagcgcttaatgattcttgttgatgttaatcaaggagggattgatagtttaaaaaagattaagatcccagttggggttacactgcgtttttcaaaataggttatggatgtaaggggaatatttggtgttaaagtagggatgagtcagatctttactgagcaaaatgagtgcttacctatcaccattgtttattgtgaagctaatcaggtggctgggattaaaacgattgctaaagataattacaacgccactctattaagctttcaaactgttgatgaaaaacaacttaacaaacctaaacaagggttcttttccaaacttaaactagaacctcataaatatctgagggaaatcagaaagatgcaagggtttgagttaggtaagaagatcaccccccaggagttgtttaagataggtgaatatgttgatgtcacttcactcaccaaaggtaggggttttacaggagcgattaaaaggtgaaactttaagataggtcctttgggtcatggggcgggttatccccaccgctttcagggttctgtgcaagcaggtagaggtggtagtagtgcgcagcgtgtttttaagggtaagaagatgtctgggcattatggtcatgaacaagttacgatccaaaacctctttattgttggctttgatgaaatcaataagttagtgttagtttcaggcgcaattgctggtcctgagggtgggattgttttaattaaaactgcaaaaaagaaaactggcaagataaaagatataaagttagcagtacaaactgttaaagccccacaactaaaagcaccaaaaaagcagaaaactaaggttgaaaccaaccaggttaacccaaaaattgaagaagagaaaactaagtaatggctaaacttaaagtaatccagtttgatggtagttttaaaggtgagatccaacctgctaaccacctccttttaaaaaaagcagtgatccaaccagtgtttgatgctatcttattagaacaagcagcatgtagacaaggcactcactctactttaactaagggtgaagttagtggtgggggtaaaaaaccatataaacaaaagcacactggtaaagctagacagggttcaataagaaacccccattatgtggggggtggtgttgtttttggtcctaaacccaaccgtaactacaaactaaaactaaacaaaaaggcttatcaacttgctttaactagtgcctttgcacaaaagcttaacaacaaccaagtgatagttgctgaagccaagttgtttgaacaaaccaatgccaaaactaaaaagatgctgacgtttctcaagaatgccaaactaactgagcaaaaactcttgtttgtgattgatactatctcaaaaccactgttgttgagtactaacaacctaaagcagatagtagtcaaacagtttaataaagtatcagtaagagatctacttttagctaaaactatcatcattgaaaaagctgcttttacaaaactggaggaacgacttaaataggctatggatgtaaccaacatactcttaaaaccagtcttaactgaaaagagttatctcaaccagatgggggaattgaaaaaatatgtctttgcaattaaccctaaagctactaaaaccaaagtaaaactagcgtttgaaattatctatggggttaaacctttaaagattaacacgctaattagaaaaccagtgaccattagaaatggcactaaataccctgggtttagtaagctagcaaaactagcagtaatcaccttacctaagggaatggatattgccattactggtgagaaaacaaccaagaaagaaacaaaggatcaataatggcaattaaaaagattattagtcgttctaacagtgggattcacaacgccactgtcattgactttaaaaaactccttaccaattccaaacccgaaaagtcgcttttagttactttaaaaaaacatgcaggaagaaacaaccagggcaagatcactgttcgccaccacggtgggagacataaacgtaagtaccgtttaattgattttaagcgttaccactatgacaatttaaaagcaactgttaaatcgattgaatatgatcctaaccgcagttgttttatctcccttttacactatcagaatggggttaaaacttacatcattagtcctgatgggattaaggttggtgatcaagtttattcatctgatcatgccattgatatcaaactaggttattgtatgccccttgcttttatccctgaaggaacccaagttcataacattgaacttaaccctaagggtgggggtaagatagcaagaagtgctggaagttatgcgaggatcttgggtcaagatgagactggtaaatacatcattctccagttaatctcaggggaaactaggaagtttttaaaggagtgtagagctacagttggtgttgtctctaacttagatcataaccttgttgtaattggtaaagcagggagaagtcgtcataagggaatcagaccaacggttagaggttcagcaatgaaccctaatgaccacccgcatgggggtggggaagggagaagcccagttggcagagatgcaccaagaaccccttggggcaaacgccatatgggtgtgaaaacacgtaacatgaaaaaacattcaactaacctgattattagaaacagaaaaggagaacaatactaatgtcaagaagtagtaaaaagggcgcatttgttgatgctcacctcttaaaaaaagtgattgaaatgaacaaacaagccaagaaaaaaccaattaagacttggtcaagaagaagtactatcttccctgagtttgtgggtaacaccttcagtgtgcataacggtaaaacctttattaatgtttatgttactgatgatatggtaggtcataagttgggtgagttttccccaactagaaactttaaacaacacactgctaaccgttagttatgattgcttttgctaaacaatacagagttcacatctccccccaaaaagcacggttagtgtgccagttaattgtgggtaagaagattaatgatgcgcaaaacatccttttaaatacgccaaagaaagctgcttactttttaactaagttactaaatagtgcgattagtaatgccactaataaccacgggatgagcggggatcttttgtatgtatttgaatgtgttgctaaccaaggacctagcatgaaaagaacaatcgctagagccaaaggttcagggagtgttttaaccaagcgttcttcaaacctagttattaagttatctgataatcccaatgaaagaaaattactcttaacccaacaaaaggaactggtgaaaaaaagaacaatgggtcataaaaaagagaaagcaaagcaaaagcaaaaacaacaataactatgggacaaaaagtaaattcaaacggcttaaggtttggcattaataagaactggatctcacggtgaactgccagttccaaccaacaaacagcaacctgattagtacaagatgagaagatccgtaacctcttttttatcaactatcgcaacgctcaggtgtctaatgttgagatagaaagaacccaaacgactgttgatgtttatgtctatgcagctcaacctgctttattgataggcagtgaaaacaaaaacatccaaaagattaccaaaatgatccaaatcattgtgggcagaaagattaaacttgatcttactatcaatgagatcggctctccgatgttatcaagtaggatcattgcccgtgatattgctaatgcgattgaaaacagagtaccactccgttcagcaatgcgccaagctctaaccaaggttttaaaagcaggtgctaatgggattaaggtattggtatcaggcagattaaatggggcggaaattgcccgtgacaagatgtatattgagggcaatatgcctctttcaactttaagagcagatattgactatgcctttgaaaaagcaaaaaccacctatggcattattggggtgaaagtatggattaacagggggatgatctatgcaaagggtttaaacagaaccccagcacacatcctccatccccaaaagaaacagctaaaaaccccaactatcaaaaaaaccaattcagtaatagcaaaacaaaaactcactggtagtgatattgaaactgctagtttaaaagcacttactgataataatcaaaaccacgaatagttaagatgttacaaccaaaaagaaccaaatacagaaaaccacataacgtcagttatgaaggacacactaagggcaatggttatgttgcttttggtgagtatggaattgttgctactaagggtaattggatcgatgcgagagcaattgaatcagcgcgggttgctatctcaaagtgcttgggtaaaactggaaagatgtgaatcaggatcttcccccacatgtcaaaaaccaaaaaacccttagaagtgaggatgggttcagggaaaggtaaccctgaattttgggttgctgttgttaaaaaggggacagtgatgtttgaagttgctaacatccctgaacaacagatgatcaaagccttaacaagagcaggccataaactccctgttacctgaaaactaatgaaaagagaggagaacagttaatgacaatcgctaaggagctgaagcaaaagagcaacgaagagttagtgaaactagtaattaagcttaagggtgaactcttagaataccgctttaaacttgcccatggtgaacttgacaaaccccatctgattgccaaggtgagaaagttattagcagttgtacttactattctcactgaacgcaaactcaactgacaagttgaaaaagataagtacaagttactttcaagaaaaaccaatgaacttattgttaacagttgaaagcaaaaactatcaactaaacctgaatccaaacaagaaactaaaaaggctgaagttaaacctaaggttgaatcaaagcctgaatccaaacaagaaactaaaaaggctgaagttaaacctttaaaacaagaaactaaaaaagttgaagttaaacctaaagttgaaccaaaacctttaaaacaagaaactaaaaaggttgaagctaggattgaaactaagactaaagttgaatcaaaacctttaaaacaagaagttaaaaaggttgaagctaaaaaatctgtttcaaaaccccaaaaaccagttaaagccaaaatgattaaaacaaaggagaaaaaacaataatgaagcgcaaccaacgtaagcagttaattggcacagttgttagcaccaaaaatgctaaaacagcaactgtcaaagtaacatcacgctttaaacatcctttgtatcacaaatcagttattcgccataaaaagtaccatgtccataactttggtgaacttgttgctaatgatggtgatagggtacaaattattgaaacaagacccctttccgctttaaagcggtgaaggattgtcaaaatcattgaaagagcaaaatagtttatggttagttttatgacaagattaaatgtagctgataatacaggcgctaagcaagtaggtattatcaaagttttaggtgctacatacaaacgttatgcattccttggtgatgttgttgttgtatcagttaaagatgcaatccctaatggcatggttaaaaagggtcaagtgttaagagcagtcattgttagaaccaaaaagggacaacaacgccaagatggtacccacctaaagttccatgacaatgcttgtgtgcttatcaaagaagataaatccccaaggggaacaagaatctttggaccagttgctagagagttgagagaaaaaggttacaacaagattttaagcttggcggtggaggttgtttaatgcaaaggattagaaaaggtgataaggtagttgtgatcactggtaaaaacaagggtggtagtgggatagtgcttaaggtattaaccaagcaaaacaaagcgattgttgaggggatcaataaggttactgttcacaaaaaagaacaagtcaacaagcgcagcaaacaaacaaacccaactactaaagaagcccctttaccattaaataaacttgctttatttgatcagaaggccaaacagcaaacaattggcaagatcaaataccaaattgatcctaaaaccaaacaaaaaacaagagtctttaagaagactaataatgccatttaactgttatgaataaccttgaaaaaacctataaaactgagttagttaatcaactccaacaacagttgggcttttcttccattatgcaagtccctaagttaacaaaaatcgttgttaacatgggagttggggatgcaattagagacaacaagttccttgaatcagcactaaatgaactgcacctgattactggtcaaaaacccgttgctactaaagctaagaatgctatctcaacttacaagttacgtgctggccaattaattggttgtaaagttactctaagaaataaaaagatgtgatcctttctggaaaaattaatctatattgctctgcccagagtaagggactttcgcggtttatcactgcgctcttttgatgggaaaggtaactatacgattggcattaaagaacagattatcttccctgaaattgtctatgatgatatcaaaagaattaggggttttgacatcactattgtcacttccaccaacaaagatagtgaagcacttgctttactgagagcactaaagatgccgtttgtaaaagaatagatatggctaaaaaatcattaaaagtaaaacaatcccgtcccaataagtttagtgtacgcgactacaccaggtgtttaaggtgtgggcgtgctagagcagtgttaagccactttggtgtgtgtaggttgtgtttccgtgaacttgcttatgcaggagcaatcccaggagttaaaaaagcatcatgataatcaataaagttcccaaagcccattttgatccagtttctgatcttttcactaagatcaacaatgctagaaaagctaagcttttaactgttaccaccatcgcttctaagttaaagatagctatcttagagattttgattaaagagggctatttagctaactatcaggtgttggaaaataaaactaaaaccaaaaaactagttagtttcacattaaaatacacccaaagaaggatatgttctattaatggggtgaaacagatctcaaaaccaggattaagaatctatcgttcctttgaaaaacttccccttgttttaaatggtcttggtattgcaattatctccactagtgatggagtgatgactgataaagtagcaaggttaaagaagattggtggggagattttagcttacgtttggtaaaaaattatgtcaaaaataggaaatagatcaatcaaaattgatcctagtaaagtgagtttaatgcaaacaacaacactgcttactattaaaggaccattaggggaaaacaccattaaactacccaaaaacttacccttaaagtttgttgttgaaaatgacactattaaagtaactaataacaacaacttaaaacaaactaagatcttacacggtactttcaatgcgttagttaacaacgcagttattggggttaccaagggttttgaaaagaaactcatcctagttggggttggttatcgtgctaatgtggaagggcaatttctcaacttacaattgggctattcccatcctattaaggagttgatcccaaaccaacttactgttaaagtagagaagaacactgaaatcaccattagtggaataaaaaaagagttagtaggtcagtttgccactgaaatcagaaagtgaagaaaacctgagccttataagggtaaaggggtactttactttaacgaagtaattgttagaaaacaaggtaaaactgcagagggcaagaaataagatgacaagaaacgataaaagaaggattagacacaaacggattgtcaaaaagattaggttaactaaccttaacaacagggttgtactaattgttatcaagagtttaaaaaacatctcggttcaagcttgggactttagtaagaacgttgttttaacatcaagttcctcacttcaactaaaattaaaaaatggcaacaaggagaatgctaaactagtgggaatggatattgcaaccaaactcatcaaactaaaccaaaaggatgtggtttttgatactgggggtagtaagtaccatggtaggattgctgctttagcagaaggagcgcgagctaagggtttaaatttttaaagctatgaatgatcaaaaaactactaacactggcttgttaacttccactcttaaaaccaagcccaaacacaaccttaaaccttccagtgaagccattaaaaaagcagtgtccaaaaaggaaggtcattacaaaaacaagcgctttcaaaaacataactttaataacaaaagtgagtttgaagagaggattgtcaaactcaaacggatctccaaaaccacaaaaggtgggagaaacatgcgctttagtgtccttgttgttgttggtaacaaaaagggcaaggttggttatgggattgctaaggcattggaagtaccacttgccattaaaaaagcgattaaaaaagcccataactccattcatacagtagagatccataagggttcaatctaccacgaagtgattggtagaaaaggtgcatctaaggtgttgttaaaacctgcacctttaggaactgggatcattgctgggggagcgatccgtgcaattgtagagttagctggttttagtgatatctataccaagaacttgggaagaaacacccccattaacatgatccatgccactatggatgggatcttaaagcaactctcacccaaaaaagtggcattattaagaaataaaccaattagtgatctataaaaacaatggaactacaccaattaaaaagtgtctctaaaagccgtaaccacaagtccaaagtggtaggtaggggccatggctcgggattaggtaaaacatcatcacgtggtcaaaagggacaaaaagcaagaaaatcaggtttaactaggttaggttttgaagggggacaaacacccctttaccgccggttgcctaagtatggggttgctaacaaagggatcttaaaaaaaaggtgggttgttttaaatttgaacaaagttgctaaactcaatctcaaaacagttactagagcaactttgattgaaaaaaaggtaattagtaaaaaaaataacctccctttgaagttaattgggaacacaaaactcactactcccatccactttgaagtgcaaaaaatctccaaaaatgctttaaatgcagtgcaaactagcaaaggtagtgtgaaaattatcacctaatgcaaactgtttcttcacccaaacaaaaacttaactttggtcaaaggttactaactctattacagaaccgtgactttatggtgtcgctggttttaacagtggtacttttaatcttgtttagggtgttagcaattatccccttaccagggattaggattaatgagagtgtcttggatagaaattccaatgactttttttcactttttaacttacttgggggtgggggattaaaccagctatcgttgtttgcagttgggatcagtccttatatctcagcccaaatcatcatgcaactgctttcaactgatctaattcctccactttcaaagctagttaacagtggggaagtggggcgaagaaagattgagatgatcacaagaattatcaccttaccctttgctttagtgcaagcatttgctgtgatccaaattgctactaatgcaggcactggttcaagtccgattagtttagctaatagtggcagtgagtttattgctttttatattattgctatgactgcagggacttatatggcagtgtttttgggtgatactatctccaaaaaaggggttggtaatgggattactttgttaattctctcagggattttatcccaactcccccagggctttattgctgcttacaatgttttgagtgggatagtaattactctaaccccacagttaactgcagcaattagcttctttatctatttcttagcattcttagttttactgtttgccactacctttatcacccaagcgaccagaaagattcccatccaacaatcaggacaagggttggttagtgaagtcaaaaccttaccttatttgcctattaaggtgaatgctgctggggtgatccctgtcatctttgcatccagtattatgtctatccctgtgaccattgcccagtttcaaccccaaactgagtcacggtggtttgtggaggattacctatcactttcaacacccgtagggatctttttatatgcagttttggttatccttttttcctttttttacagttacatccagattaacccagaacggttagctaagaactttgaaaaatctggcagatttatcccagggattcgaccgggcaatgatacagagaaacacattgcgcgggtgttaataaggattaactttataggtgctccttttttaactgttattgctattatcccttacattgtttcttatttcattaggttacctaactccttgagtttaggggggacggggattattattattgttactgctgtagttgaatttatcagtgcactgcgttcagctgctactgctactaactaccaacaactaaggagaaacttagcaattgaagtgcaacaaacagctaaacaagatagtctagagcagcttcaaaaagaagcaccagggattggtaacctatggtagcacagtttaataagttcattatcttaggacccccaggggcaggaaaaggtacagtttgtaaactgcttagcaaaacaactaagttagtccatattgctagtggtgatctgtttagagaagccattaaaaaccagagtgttattggtagaaagattgcagcaattatcagtcagggtggttatgttgatgatgccactactaaccagcttgtttatgaatatatcactaccaatccattaccaaatggttttatcttagatggttatccaagaacagagaaccagcttgattttctaaatattaaactaaccattgacatggtctttgaactagttgttagtgatctgaataaactgattacacggattgataacagggttatttgtaacaactgtaacagtgtttataacttgctttttcaaaaaccactagttgaaaatagttgtgatcagtgttcagctaaactagtgaaaaggagtgatgataacaaagcagtggtcaaagcaagaatggagttatatcaacaaacaattcaaccaatccacacttactttttcaacaaacaacttttagtacaaattgattgctttttaccactagaagaacaactcaagacaatcaaacaatttattagataaagatgatctatctcaaatctgcaaatgaagttgcagggattaaaaaagcatgtgcaatcttcaaagcagttaaggcatattttacaattgaaaagttacttggcaaaaagttggttaccattgatcgtttaatcaaacaattcattgaacaaaaacaagctaaatgtgcgtttcatggttatctaggtttccctggttttaactgtctatcgttaaaccaaacggttatccatggagttgccgatcaaactgtttttaaagatagtgataaactaacgcttgacattgggatagactatcatggttatctttgtgatgcagctttcactttacttggtaataaagctgatccaaaggcagtaaaactgttaaatgatgttgaacaagcatttagtaaggtaattgaacctgagctatttgttaacaatccgattggtaatttatccaatgcgatccaaacttactttgaaaacaagggctattttcttgtcaaagagtttgggggtcatggttgtgggattaagatccatgaagatcctttaatcttaaactggggagagaaaaaccagggcgttaggttacaagaggggatggtaatctgtattgaaccgatggttatgactgatagtagtgagataacaatggcagctaacaactggaatgtactaactttaaagagtaagtttaactgtcatgtggaacagatgtatcacatcacaaacaacggctttgaatgtttaactaactaatgaaaaacgataaactctttctaacaggtaagatactggaaattatccatggtgataagtaccgggtgatgcttgaaaacaatgttgaggttgatgcacatctagcaggtaaaatgaagatgaaaagaaccaagattctccctggggatgttgttgaggtggaattttctccctatgatttgaaactaggtaggataacccaaagaaaataattaaaatattatgaaggttagagcaagcgtaaaaccaatttgtaaagattgtaagatcatcaaacgtcaccgcatcttaagggtgatctgcaaaaccaaaaaacacaagcaaaggcaaggataatggcacgaatcttagggattgatatccccaaccaaaaacggatcgagatagctttaacatacatctttgggattggtttgtcaagtgcaaaaacaatcttaaaaaaagcaaagattaaccctgataaacgcgttaaagatctgagtgaagaggaacttgttgcgattagaaacgcagcaagcggttacaagattgagggtgatttgagaagagagattgctttaaacatcaaacacctaacagagatcggttcttgaaaagggattagacacagaaaaaacctgccagtaagaggacaacgcactagaaccaacgcaagaaccagaaaaggccctagaaaaacagtggctaacaagaaaattgaaagtaagtaatggctaagaaaaaaaagattaatgttcccagtggtttgatccatgtctcctgttcacctaacaataccatagtatcagccactgatcccagtggtaatgtcttgtgctgagcgagcagtggtacagtaggattcaaaggttttagaaagaaaaccccttactcagcaggggtagcagctgataaggtggctaaaactgtgaaagagatgggaatggggagtgttaagatgtatctgaagggaacaggtagaggaaaagacaccacgattagaagctttgctaatgctgggattacgatcacagaaatcaatgaaaaaacccctattccccacaatggctgcaagctcctaagcgtccgcgctaatcaaaacaacaacttatggaaaaatttttaaagtacgaaattaaggttaacaacaaccaaccaaccaacactaaccctaactatgggatctttgaagtagcaccgttagaatcaggatttgggattaccattggtaatgcgatgcgccgagtgttacttagttgtatcccaggcgctagtgtgtttgccattgccattagtggggtaaaacaagagtttagtaatgtggagggtgtgttggaagatgtgactgaaatggtgttaaacttcaagcaactagtggtgagaatctctgatcttttgtttgaagatggggagatgatcgaaccacccttagaaaggtgaccagttttaaaagttactgctgaaaaaaagggtgcagtatatgcaaaggatcttgagtgtccagctggttttgaagtgattaataaggacctttatctcttctctttacaaaaggacatgaaactaacagtcagtgtttatgttaaacagggtaggggctttactagctttcttgaaaacagagaattgatcaattcgcttggcattattgctacagatgctaacttttccccggttttacactgtggttatgaagttcaagaggtgaaaacttccaaacaaaagttaactgaccatctcacctttaagattgctactaacggtgcaattaaagcagtggatgcgtttgctatggcagcaaagatcctaattgaacacttaaacccaattgtaagtgtcaatgagtcaattaagaatttaacaattatccaagagaaagcagaggaaagaaaggtgaaatcatttgccaagcaaattgaagaacttgactttactgttagaacctttaactgtttgaaaagaagtgggatccacacactccaagagttactatcaaagtcattaactgacattagagagattagaaacctaggtaagaaatcagaacgggagattatcaaaaaggtgcaagagttaggtttaaaattccgttcttaataaaatagagctatgtcatacattaataaagaggggaaaaccacagcttgaagagtgatgacagtgcgtcagcaagtgagtgcagtgttaagttatggaaagattcaaaccactttaaaaaaagctaagaacacccaaaaaaggttagagaagattattaccattgctaaagttgataactttaacaaccgcagggctgttaaaaagtggttattaaataccaattcattagatgtagatcaactcacaaaccacctttttaaaaaagtagcaccacgttttttaaagcgtaatggtggttatagtagagtgttaaagttgggagttagaaggggtgatagtactgaaatggcgatcttacagctgatagatgctaccaactaaacaagctgcttgtagttttattaatgttgctttttcctataatgaactgccattaattagggaactatcttttagtgtttatgagggggaatatgtttgtattgttggtcataatggcagtggtaaatcaaccatttccaaactgttaacagggttattaaagccccaggcaggtgagattaagatctttggtaaaacagttgattttgataatgttagttacttgagaaataacattgggatcatctttcaaaaccctgataaccagtttattgggatcactgttgaagatgacattgcctttgggcttgaaaacaagtgtttttcaagacagaagataaaagccattattgatgaagttaccctacaaacccaaactgatgggtttattaaacaagaaccccataacctatcagggggacaaaaacaacgggtagcaattgcatctgttttagcactaaatcctgctattatcatctttgatgaatcaactgcgatgttagatcctaaagctaaaaaaacgattaagcagtttatggttaaactagccaaacagggcaagtgtgtgatctcaattacccatgatatggaagaagttactaaagctgataaggtgttagtaatgaatgagggcaaactgatcaaacaaggtaaacctgttgaagttttcactagtgaacaagagttacaaaaaatccgtttagacatccctttttcactcagtctttcaaccaagataagagggatcactagtacaattgattaccaaaccctgattaaatcaattgccaagctgtgaaaaaaaagatagtcccaattaaccctttaaaagcagatgagattttagcagttagtcacttatcatgtgtttttaacagtaaaactaacaatcccattaaggtgattgatgatttttcctatacctttcaaaagaaccaaatttactgtattattggtgatagtggcagtggtaaatcaacccttgttaaccacttcaatgggttgataaaacccaaccaaggtgatatttgggttaaagatatctatattggtgctaaacaacgcaagattaagaactttaaaaaactgcgaaaaactatctcaattgttttccagtttcctgagtaccaattgtttaaagataccgtggaaaaagacattatgtttggtccagtagcattaggtcaatccaagtatgatgcgcgccaaaaagcggcttattatctggagatgatggggttaaaatacccttttttagaacgtaatccctttgaattgagtggggggcagaaaagaagggtagcgattgctggtatacttgcaattgaaccagaaattctaatctttgatgaaccaactgctgggcttgatcctgaaggggaaagggagatgatgcagttaattaaaactgccaaacaacaacaaagaacggtatttatgatcacccaccagatggaaaatgtccttgaggtggctgatgtggttttggttttagctaagggtaaactagtaaaagctgctagtccatatgaagtgtttatggaccaaactttccttgaaaaaacaacgattgttctcccccctgtgatccaagtgatcaaagatctaattgcgattaatgctcactttaataagttaattgagttgcaaccaaagaacctagaacagcttgcatcagcaattaacaagactatagcaaaccatggataactttattaatggctatatcccaagaaacagctttgttcacaagctgcatccaactactaaactagtaatctttttactgttagttatcttggtatttgtaccaattggctttgtttttcaaagtgttatctttctttttgttacctttgttttttttattgctaaactcccggggcggttttacagttcagcaattaagtcaattacgctgttatttctcttgttgttatttgtaaactggtttacctttcgtgatccagggttttatcttactagtgatcaacttaacagtttaccagccattgataacagcaagtttagcttttgaaacattagtttgtttaactatcaagataatgttttttcccaggtttttgcttttaacaggggtaatttaaccaacttaaatcaacttgattttttctataaagctaacaatgctgatagttacaccaaagtaaagggcattgatagtttagcaagtatgctagcaaacaatggcaatggtttaagcaaagacaaaattctgagtgcttttttagatcacaatttaaacctttatttagcgagaagttggggggcaaattttgctgggtttgttgttgattttaacccaacaacccaactctttaaactcaccccttttctagcaaatgctagttatgttttaacgttaagagcagttatcttagcattctatgtcacccaaaagatcctaattatgatcttatttgcaactgtactcacttccacttcaagttcagttgaactagcatatgggattgaaaggttattatgacctttaaaactcattaaaatacctgttaatgtctttgcaatgaccattgccattgccattaggtttgtcccttccttgttactagaatcacaacggatcttaaatgcccaagcctccaggggtttagactttcgaaatgggggatttttagtgaagatgcgttcactctcttcgttagtagtgccaatggtttccattgcctttcgcaatgcctctgaacttgctagtgcaatggaagcaaggggttatcaccctgcaaagaagcgcagtagttatagacaatacaaaatcacttggattgatattttagcgttatttttggtttttgcttggtttgttgtgattatctttttaactattagaggagcggtctttttggatctaggtacaccagaatggttattaacaggaaagattaatgaacaggtaatcagggatctgaaggtaagtggctaggtacttggggattgttagttatgatggcagttactttaaagggtgagcgattcaaccaaacctagctactatccaaggtttattggagcaaagtttttcattaatcattggcagaaagataaaggtaattggttcaggtagaactgataaaggggtacatgccatcaaccaaacctttcatgttgatattaatggtgaaattaatctcaatttgttaattagaaaaattaaccagttgattaagccccactgtatagttaaaaccttggtattggttaacgatagctttcatgcgcggtttcaagttaaaaccaaggtgtatgaatatctgattaactgtgggaatttaaatccgttgcaatttaactatgtttggcagttaaaccagcaattggatcttgaaaaactcaaagctgatgccactttatttttaggtaagaaaaactttcttagcttcagtagttcgattcacactgattcaattcgcacaattagtaaaattaccatacaaaaagaaactaaccaactagttagactaactttttttggcagtggttttctcaggagtcaagtgaggatgatagttgcttgtttagtgaatttaaacactaataaaatggcacttgaaacagttgcaaaattgtttgaacaccccaagaaagggagttgtgttgttaaagcccctagttgtggtttgtatctgaaaacagtggtatatgaaaaatagttacaagtgggatctatcagttttattaaacaaccaaagcttacaagcaaattttttaaaaattcaaacagttagtgaagcgttaattaaagcttataacaacgggttgtgttttacaaataaaactagctttgaacagtttttagcaatcgatgataagttcactgaacttgaaaatcgttacactaactacctttataacaagcagaatgaaaataacttggataaggaggttaatgatgcaatttttgcataccagagttttaaaaataaccataaccttgctttcagtacactgcaacaggagttatataaccatgaaaaactcattaaggattatttaactgatccaaagctagcggtttacaagcgcaacttaatgttagtttttcgcgataaaccccaccaactatctagtcaaacccagagtttattgagtcaaattaacccttgttttaaccaagcagaacggatttttaacatcctttcaactgctgatttaaacttgcaacctgttgtttatcaaaacaaaaaatatccgattaacagtgtgagtgattatcagtccttacttgaaaacactaacagggggattagaaaagcttgttatgagaagtggattgaaatttattgaactaatagaaacagcttaagtttaagtttggtggaaaattacatccaactagagaacttcgctaaactaaagaaccatcctagttacattgcccaaactgcttttaatgatgagattgaagttggttttattgattttgtttaccaacaagtagctcagtttgccaaaacctttcaagcatttattcgcttaaaaaaacagatttataaacatgttttaaaagtcaataaagttgaaccatatgatcttaccctaacactttttaaaactaaaaaatcatacacgattgaacaagctaaacaagatgcactaaaagttttagatctacttggtgacaactacatcaagatagttaaaaaggcttttaatgaaaactggattgattgactagcagataaaaacaagtacacaggggcatattcaatctccaatgttaagggcttagagcacttttttatcttaatgaactttgataaaaccaaatcatcactaaatacgttggtacatgaacttggtcattcagttcactcttggtatgcatcacaacaccaatcccaaaacatcgatcctactatcttttatgctgagattgcttctattgccaatgaactgttgttgtgttattatgagctgcaactttataaaaataaccacaagcagttaattgctagtttattgagtcaaatcaaccatttttttggcgctactacaagacaaataatgttttcacaatttgaaaaagatacgctttatttaatcagagttaaccagaaacctgactttaaaactttgattaaaatttatgcaaatactgcggttaaataccaaggttttaaacctgaagtagttgctaataaactaaaaaagacccagtatcaaaaatcattgtcacacatcattgctatcccccatttttatgcaggtaacttctatgtttacaagtatgccattggccaagttgcaggtattttagtagctaaaaaaattaatagtggtgataaaaagatgaaagataattactttaaattcctcagttcaggttctagtttagcgccacttgaaaccattaaactcttagggattgaccttacttcaccccaaccctgacaagaagcacataacgaagtaaagcgttggcttaaaattgtgaaacaaagctttaaaaaactccaaaaataagtgcaccattttaaccgcgctaaaaaggccaagaataacgagttttttactttaattgatgagattgaaaacgaagtaattaactaccaaaagcagtttgcaaataaaaccattttttgtaactgtaatgatggtaaaaattcccatttttttcagttttttcaaactaactttaaccagttacaactaaaaaaactcattgggtttagttttaataatctctcacaagctgacaagttcacttttgatggaaataaagtaactaaaaccaaattaaagggtaatggtgattttagttctgatgaatcgattgaagtgttaaaacaagcagatatagttgtaacaaatccaccctttagtttgtttcaaagtttcattgatctgttaatacaacacaacaagcagtttctggttttagggttaaatgcagcagttagctataaccatatttttacctactttaaaactaacaagttgtggtttggctataccgttaataaaacaatgagtttttcagttaacagtgactatcaactttataaccccaaaactagtaacttttttacaaaaaatggcaagtgtttccaaaagatagcaggtatctcttggtttactaatttaggaaaaccacattataacccctttttaaataccaactgtttttataaaaacaacgaaaaaaactatcccaagtttgattggtatgatgctatttatgtcaacaagattaaaaacatccctatggattgaaatggattgatgggagttcctttaacctttttaaactgttacaaccccaagcagtttgaattagttgattgtcttgctaacccttatgctaccttagatacattaaaaacaaatgcctttgtgaaattaaatcagggtgatgtgagaaatgttaatggtaaaagaaggtatgtaagggtaataattaaaaaacaacaaatttagttttttcaacatttaacaactctgtttttacaaaagttagcttaattttgctaaattgttttttgatagcacactgctgtcaacgaaccatgttgataaatgaaattcaaactattttttttatcaagcagtgtgttgggtccaattgccctatttacaactgcttgtagtgctgtttataggtttgatcaagttgatgatggcaagattaaactagcaactgtaacttcagcttccgctagtggctcgcttactactatcatcagtaaatataattcacaaaaagatcctaatgattatccagtggaactggtttcacttgatagtaggggcagttattctaatggcaaaaaggatctgcaagctaaactgctagctaaggataaaaataacttttataaccttacttttaactatagtgatgtagtttcaatcctctcaagaagccagatggagttgagctttgatacggttgatactagtaattttgatcctagttttcttagttttaacaataatatttccaatgttaatccaaatagcatctatgctttacctgctactgtatcaggtgaagttttagttttaaatggaccggtgttacattacattttaagtagtgctaaaaaagatagtaacaccaccctttcaacccattcagctagcaataatagcaataagggaacaatggttgttgctagtgatagtgaaacatcaagtttatgaactaaattagaagctgcagcaaaaatgaatgctcaaactaatgaaacccaagttttaaaaagtaattcatcagaatctaaccaaacccaagctagtgatacagagattaaaaagatttggggtgattatcaagaagttgatggagggttgaaaaattacacctttaaagctagtgtttttaacaattgaaaagacctaaatgactttgccaccaggattgcaaaatcctttacaaaactgcaaactaccactaaaaaaggggaggaagtacaagctgtatttgggattggtagtttggaaaatgccttatatactgctttatttgcttctggaaaagctgattacaataactttctttttaacatcaaaaaccagcgaattaatttcagtaacttttttaataaatcctcaactgcatttcaaaaccttaaaactatctttaacagcttcaaatccttaattgatcaaaacggtttaatctcaaatgcacactttaacaccccagttaatgactatgctaagtttaaccaattagctttttacacctcttcaactgcacgctttccctattcatttgcaagtgatagtgtaaagcgtttaatagttaatgacaagacaattgaaaacaaaaacaataagagtgtttttgaggttaatttaagtagtgatagtgataacaacagtaacctaattggtactgtatcactggaaaatagtaaacaagtttcactctatgaaaagcaagtggatagtaataaacaaattggtgttgatgctttgttaatcaaagatgaaactttaatcaaccatcttaagagtttaaaatcgcaagttagtgcaaaaagtgctagtgaaacttcccaaacaaaacaaaacaaaacctttttagcatttacaactgtgaatgcagatcaaaaagcaatctttgatgttggtaaacttaatggcaaaactgccaaaatcattattaatgctactgaaacaactaatgctaagattagcaccttacaagaaaaagaggcaatagttctaaaagcaccccaacgctttgagagcactgatccatttcctattgctttagtgcaaggtcctagtttaatagggatccatgcaaatgaaagagaggatattgaaaccaaaaagtttgtgaattggtatctgaatactaaagtccaatgggaagaaaattctattaaaactcctgcagaatatgtagctgataaagcttcttatcttttaccttttaaaaataggctaaataatactaacagttacaatgagtttgttaaaactgcagttagtcagtttgctgataaaaatgtaactaaatttgcagaacctgctgattttttatccaacaaagtacgtgatggtgttaagagtaatttaaatgctgcaattaacaaccacagcattgattttgatagttttatcaatgatttaacagactatcttggtagtgatgttaaaaacatctaataatttattcccccaacctctattttctgttactagtgcctaaggtggtagtggagtatcacaacctgaataaccaagtagtcaaagagagtttggaagtggaatcttcttcctctttcaaccccacccaaaggttgcaaaaagatagtccggtgaaggattcaaacaaagacagtgagaaactcgaaacaactgcttcatcgatgagtagtggggctacatctcctcgcaaggcccttaagatagaggtggagaaaggcagtaatgtcaatcaaggcgaactagcaaaaaacgactttgctaaaaagccactgaaacataagaacagtagtgggacagaggtgaagttagctgcgaatggggagtttgcaggagacaaggcctgaaaaccattgttgactaccgagcaaataaaagataatagggggatgggggctttctccaactccccctccccttcaacttccgcttcctcaacccccctccccactttttctaacatcaatgttggggttaaatcaatgatcactcaacatttaaatcagcaaaacacccggtgggtgtttatacctaacttttcacctgacatctgaacaggagcaggttatagaaaagctaataacaacaataacggcattccttttgaacaggtgaaacctagcaatagtagtcaacagtttaatcccaattcagatgataataaagtcactcaaggtggtggctccccagccaaaaaaacaacgtatgacaatttaccaaactccatcagtcccaccagtgactggatcaacgcattgacttttactaataagaataacccgcagcgcaatcaactgttgctcagaagcttactaggaactatcccggtcttgatcaataagagtggaggaagtgggaatgagtttacccatacgagtgagcagaagtgggataaaacgaatgaaaaagatgggaatttacctgggtttggggaggtgaatggtggttttattatgtttttatcaaatctttatttactttaatagttaaaaaagttttgaatttttcttagttttttatttgtttaatatttaagaaagtctcaaatttttatcagtttattggtcaaagaagtcgcaaattttcttaatttatttattcaatagttaaaaaagcgttaggtttttcttagtttttttatttgtttaatatttaaaaatttcttgatttttatccttaatttaattaataaaacctttacccctattatcacaaaccatccataacaccaacctgtttgtgttgttcaagtctagggatgtaaaagttaagtatgagtcaagtggcagtaacaacattagttttgattcaactagtcaaggtgaaaaaccatcctatgtggtcgagtttactaactctaccaacattggcatcaagtgaagcgtggtgaaaaagtatcagttagatctaccaaatgttaccaatgagatgaaccaagtgttgcaagaattgatcctagaacaaccccttaccaagtataccttaaacagtagtttggctaaacaaaagggtaaaacccaaagggaggtgcatctctcaaattcaaatcagtgacaatcgatgcgtaatcaacatgacctaaacaacaatcccagccccaatgcttcaactggatttaaattagacaaaggcaatgcatatagaaaactaagtgaatcctgaccaatttaccaaccaattgatgggaccaagcagggcaaagggaaggatagtagtgggtggagttcaacagaagcaacaacggcaaaaaatgatgcgcccagtgtttctggaagtggaacatcagacaccgcttcaaaattcaaaagttacctcaacaccaagcaagcgttagagagcatcggcattttgtttgatggaacaacggcgaggaatgtggttaccctccttcctctactttcaacccaacaaggtgaaaagtggtcaatatcaacaaaataacacctacaacaagttaattgaaccggaaagtgcaacaagtgcagcgagcagcatgaccaacttgttaaacatgttgtctagtaaaaacatcaaacagaagttggggaaggggggaacagcaatgcagggaagtttcagtgtccaagacaccttcagctttgttgttccttattcggggaatcatacaaatagtggaacaactggacccattaaaactgcttatccggtgaaaaaagatcaaaaatcaactgtcaagatcaattccttgatcaacgctacgccgttgaatagttatggggatttaaataatcacaccaagttaatttacccaaattatttacttatttattaaccattgttacccaatttttcaaccacttccccactctataaattgttattttttaacaatttgaacaattaaattgcaaaaaataactatattaatgtaaatttagctaacaagcttaactggttgtttttgagatgaaagggtttttaaaaccaaatttctcgctcggtgctttgtttttaactttaagccccatagccactgcatgcattgctgaaaaaccagttaacaaccgctttaactttaatagcgagcaattagctaggctaagaaaagcaagggttaaccactgaagagatggggatactttggaagttagctttgcaaataaccaccaaaaaccgatccgtatctatgccattgatacccctgaaaaagcagttttatctatacaacgcaaatcagagatagaacttaaagaagctaataaagcaactgagtttgccaaaagcttaattcccattggtagtgaggtgtggatctgaccactaaatagctatagctatgatcgtgaagtagctgcagtgtttttcaaaaccaatccattgcaactgcactttgaatcgtttgcagttgaaatggtagcaaatggtcatgctttacctattgctggtaatgactttgattttgtttttagtgatttggacccatttaatcccctaaaaatagtagggattgaactagctaatggtttaaacaatgcttttaacaacagaaaaaacatctttagttatttagaaaacagttttcaatcaataacaatggtctatcaacaacgcggtgttgaccaaagttgaacaaggtatttagctcctagtaatgatttttcctctactaaactggggttgggattaaccatctatgaattgaaactaaacaatggctaacaataagagtgcaattgagttgaaaaacatcgttgttgattttggtgaatcagttgcgattgacaacattaaccttagtgttgaaaaacaccaactagttagcttacttggtcctagtggttgtggtaaaaccactacacttgcagttattgcaggacttattaaaccaactagtggtcaggtgttatttaatggttatgatgtcaccaaaaaaccaccccaagaacgtaaactagggctagtttttcaaaactatgcactttatccgcacatgaatgtgtttgaaaacattgttttccccctctacagtgataactcgtgaaaacaagcagttttggaaaaaaacagtgttgcaaaccatgagattaactgtttgttacttactagcaacggtgcatcagttcaagagattgatcagctcaataagttatttcatgatagtattgaaaaacccaaacagatccaataccaaattaatgaccttaatgttagtgtttttaaaaacttaaatgaactaactgcaaaccttaagttaataccaagtaagcaccagtttgctattaccaatctcaacaaacaaactctaaaacagattaatgaactggaagctgagtttaaaacaaagtgaaagttacaaaaacaaaccccaattaagagtggggttgaacacaatgccaaactccaagcaattaaacaacactttagttatgaaaaacaacggttaaaaaaacactatttcaaaactaaagtggaactaaaacaaacccttgttgaaaaccttaagttagttaaaaaagcgattagtgaacaaactaagttaattaaacagagtagtgattacactaagttaaagcaattaaaacggttaattaaagttgaacctaaccaactcaaaaaacaatataaggtttttctcaatcagttaattaaaaactattcacttaaaactgataagttaactgatactcaacttaatgaaattgaacagattaaaaccagaattgtttcaataaaacagtttatcaacaaaactgcacttgaagtagctaacaaactagcgattaccaagattttaaccaaacgccctgataagatttctggtggacaacaacaacgcgtagcaattgctagagcaattgtcagaagacctaaactattgttaatggatgaaccactctctaacttagatgcaaagctaagggtacagacaagacagtggatcagacagtttcaacaggagttacaaattaccactgtttttgtcacccatgaccaggaagaagcgatgagtattagtgatgtcattgtttgtatgtcaactggaaaagtgcagcaaatcggcacacccagtgaactttatttaaaacctgctaatgagtttgttgcgcgctttttaggcacccctgagatgaacatcattgaatgtagtgtcaaaaacaaccagttgttttgaaacaaccatctgttagttactgagagttttaagcttaatgtagagaaactcttagttgggtttaggtatgaacaactagtggtcactactaacaaaagtagtttgcaagctaaactaattaacattgaaaacttaggtaaacacttagttgctaccattagtttgtttgataccaccttatcaatgcgcttagaattgaatagccacttaaaagtaggtgatagtttaaatttcattattaaagctaacaacctccatttttttgatattgatacaaaacaacggattgagatttaacaatgtttaagtggttattaaaacatcataatcaacctcatagcctccagttagggttactagaccaaccattaccgttctgaaagccctttttgttgttcctccctgcgcttttaacaacaattttgtttaccattatccccttctttttaagcttacagaagggttttagtgctaacagtgatctgtatgatctctcctcccaatcctttagtttacgaacctttcaggatctgtttagtgaatctaactttgtgttgggcttacgcaatagttttctctattcactaatctctttaccctttagcattatcattgctattgttattgccagtgccatagtatttgtgtacaaaaaattgttaagagggttttgacagaccgtgttttttttaccctatgtaacttcaggggtggcaatctcgattgcctttgtatatatctttgattctgcctctggtattttaaacacggtgtttaatgtcaacaccaagtggcttgattcaggttcacgtgatacatttaatgccttgtgggctatcttaatctttggggtgtggaaaaacttggcatttaatgtgttgattatctcaacagcaatgttaagtgttaatccccaactttacaaggtagcaagtttagatagtgccaatcctgtaagacagttctttaagattactcttccctccatccgtcctactttaatctttcttactacccttttaatcttaggggggatgcaagtctttccgctggctttgtttgaaaacaaacctgaagaagcggttgctaatggggggaatagtatcttgctttacatctttcaacagatccaaagtggcaatactaacttagcaggtgctgctactttagtgttgtttgtgttgggagtttgttatgggttagtgttacgtaatggcttttatctgattgaatggttgcagtgaaaaattaaacagctttatgttcaaaaacaacttacgctttactagttgaattaatcaacacaagttttaccaacttgatctgagcttaaaaacccgctcgatcaaacaaattgttttaacgttggttttcaaaacattggtattggggttttttgggttaattgtcatctttcccttttatctgatggttgtggttagttttgctagtgatgaaagagcattagacacaagaaccccaatcctttgacctgatagttgaaactttgataactttagtagggtgttaagtgatgggaaatatctcaatgcaatagttgtcaatactttagtaacggtactttcagtgttactaacattgttttttaccatttgcatgggttatagtttttcactacggaagtgaaaatacaaaaaactggtgtggtttttctttcttagtgtgttaatactgcctgagtctgcgcttttaattggtcagtatcggattgtaatagttgctaactgaaataaccccaacagtcccttgattgttctgggactcattatgccctttgttagcagtgtttttagtgggtttatgtaccgtactagctttgaagccattccatctcaattaaaagagtcagcactcattgatgggtgtaatggctttaactactttttgaagattgctttaccaatggtgaaatctaccagttgaacagtggggattttaactgcatttagtgcttgaaattcctatttatgaccattactgttgttgggcaacagggtggatttaaacattaacttgtgggtgttacaacaagggatcttggatgctaacagtagtgatgaacagatcagaacgctgttaaatctcaagatgagtgcagcgattctagctatccttccgatgtttattatctactttttgttccataaaaggattatgaatgccattaaaaacagagccaacaccattaagggttaatatgcaaaagtttaaacaactggttggtgcaatgcacagatgggtaaaactagcactattagtaatcattgtgttattagggattatcttttgtctgtttgccatctatgacattgcgcaagtgatcattaccattatcaatgaaggggcacttttataatctttgttatgaaaaaaggatcaataactgaagcaattaatgccattaaacaatttgataagattgttatctttcaccatgtgcgccctgatggggattgtttaggagcacaacaaggcttgtttcacctcattaaagctaactttaaaaataaggaggtgaagtgtgttggtaataacaacaacctgtttagctttatcaacatgacatttaccaaccaaattgatgagagctttttaaaagaagcacttgccattgtggtcgatgctaattacaaaaacaggattgaattgagagaactgttagataaaaacctgtttaaagcagtgttaaggattgatcaccatcccaatgaagatgatctaaacactagctttaactttgttgaagaaagctatgtagcttgttgtgagcagatagtggagatggccacagtggcgaagtggaccataccaccagtggctgctactttactatatataggtatctatacggatagtaatagatttctatatagtaatacatcatatagaacactatacttagcagcaatactatataaagctaaagctgatataaggatagtacatgatcatttaaaccatactagtttagcagatcttaagtttaaaaagtatgtttataaccactttaaaacccaaggacaagtgatctattttatctgtactaaaaagatccaaaagagactaagaatgactgcagatcaatgtgctagagttaacttgttaagtaacatagcagattacaagatctgacttttctttattgaacaagctaataatgagatcaggatagacctgaggagtaatgggattaatgtcagagatatagccattaagtatggtgggggaggacataataatgcaagtggagcgatcattactaacaaaaaacaaattagtgatgttgttagtgattgtgtgaaaaaaattgtttataattaagtttgtatgcaccaaccaaagaaaagactggctaagaagtcttgagcctttctaaccgctgcacttacccttggggttataacaggtgtaggtggttattttctctttaaccaaaataagcaacgtagtagcgtgagcaactttgcttaccaacccaagcagttaagtgttaaacaccaacaagcagttgatgaaaccttaaccccttggacttgaaacaataacaacttctcttcactaaagattactggagagaacccaggatcatttggattagtaagaagccaaaatgacaacttaaatatttcaagtgttacaaagaattctagtgatgataatctcaagtatctcaatgctgttgagaaataccttgatggtcagcaaaactttgcaatcagaaggtatgataacaacggtagagctttatatgatattaacttagcaaaaatggaaaacccctcaacggtgcaaaggggtttaaatggcgagcctatctttgatccttttaaaggctttggtttaactggtaatgcccctactgattggaatgagatcaaaggtaaagttccagtagaagtagttcaatccccccattcccccaacctctattttgtgttactagtgcctaaggtggcattagagtatcacaacctgaataaccaagtagtcaaagagagtttggaagtgaaagcaacccaatcatccttcaaccccacccaaaggttgcaaaaagatagtccagtgaaggattcaagtaaacaaggggagaaactcagtgaaacaactgcttcatccatgagtagtggtatggctacatccactcgagccaaggccctcaaagtggaggtggaaagggggagtcaaagtgattcacttttaaaaaacgactttgctaaaaagccactaaagcataagaacagtagtggggaggtgaagttagaggcagagaaggagtttactgaggcctgaaaaccattgttgactactgatcaaatagcaagagagaaggggatgggggcgacggtggttagtttctatgatgcaccctacagtgaaaaccatactgcctttggacttgttgatcacatcgatcctaaaaagatggttgaaaactacccaccaagttgaaagaccccgaagtgaaaccaccatgggatctgggattacaacgcaagaaacctcttgttacaaacaacagggttctttaacccaagaagacacccggagtggtttgatgaaggacaagctaaggcagataacactagccctggctttaaggtaggggatactgatcacaaaaaagacgggtttaaaaaaaactcttcttctccaatagctttaccatttgaagcatactttgctaacattggtaacatggttgctattggtaactcggtatttatctttggtggtaatggtcatgctactaagatgtttaccaccaatcccttaagtattggggtatttaggattaaatacactgataactttagtaagtcatcagtaacaggttgaccatatgcagtgttatttgggggattaattaatccccaaaccaatggcttgaaagatcttccccttggtaccaacaggtggtttgaatatgtaccaagaatggcagttagtggggtgaaatgggttggtaatcaactagtgttagcaggaacactaacaatgggtgatacagctactgtacctaggttaaagtatgatcaactagaaaaacacttaaacctagttgctcaaggccagggactattgagagaagacttgcagatcttcactccctatgggtgagctaatcgtcctgatattcctgtaggagcatgactccaagatgaaatgggcagtaaatttggtccccattacttcttaaataaccctgatatccaggacaatgttaataatgatacggttgaagcattaatcagtagttacaaaaacactgataagttaaaacacgtttatccttatcgatacagtggtttgtatgcttgacagttatttaactggtctaacaaactaaccaacactcccctatcagctaactttgttaatgaaaacagttatgcaccaaacagtttgtttgctgctatcttaaatgaagatctgttaacagggctaagtgataagattttctatggtaaggagaatgagtttgctgaaaatgaagcagataggtttaaccaacttttaagtttaaatcctaatcctaacactaactgagctaggtatttaaacgtagtacaacgttttactaccggacctaaccttgatagttctaccttcgatcagttcttagactttctcccctgaatcggcaatggtaaacccttttccaactccccctccccttcaacttccgcttcctcttctacccccctccccactttttctaacatcaatgttggggttaaatcaatgatcactcaacatttaaataaagaaaacacccggtgggtgtttatacctaacttttcacctgacatctgaacaggagcagggtatcgcgttcaaagtgctaatcagaaaaacggcattccttttgaacaggtgaaacctagcaataatagtaccccctttgatcccaattcagatgataataaagtcacaccatcaggtggctcctccaaaccaaccacctatcctgctttacccaacagtatcagtcccaccagtgactggatcaatgcattgactttcactaataagaataacccgcagcgcaatcaactgttgctcagaagcttactaggaactattccggtcttgatcaataagagtggggatagtaatgatcaatttaacaaggatagtgagcagaaatgggataaaactgagacaaatgagggtaatttacctgggtttggggaggtgaatgggttgtataatgccgcattactccatacctatggtttttttggcaccaataccaactctactgatcctaagataggttttaaagctgatagtagtagtagtagtagtagtacactagtaggtagtgggttaaactgaactagtcaggatgtaggtaatcttgttgtaatcaatgacaccagctttgggtttcaacttggtggttggtttattaccttcactgactttatcagaccaagaactggttatctagggattaccttaagtagcttacaagatcaaaccattatctgagcagatcagccttgaactagtttcaaaggcagttatctagacagtgatggtacccctaaatcactgtgagatccaactgctttaaaatcccttccaaatagttcaactacctatgataccaatcctaccctctcaccctccttccaactctaccaacccaacaaggtgaaggcttaccaaaccactaacacctacaacaagttaattgaaccagttgatgcaacaagtgcagcaactaacatgaccagtttgttaaaactcctaacaactaaaaacatcaaagcgaaattggggaagggaacagcttcttcgcagggaaataataatggagggggtgttagtcaaacgattaacaccatcaccactacgggaaatattagtgaaggtctaaaagaagaaactagtattcaagcagaaacacttaaaaagttctttgatagtaaacaaaacaataagagtgaaatagggataggtgatagtacatttaccaagatggatggtaaactaactggcgtagtatctactccccttgttaaccttatcaatggccagggagcaactagtgatagtgatactgaaaaaattagctttaaacctggtaaccagattgactttaataggttattcaccttaccagtaactgaactatttgatcctaacacgatgtttgtctatgaccagtatgtaccactattggttaacttacctagtggctttgatcaagcttcaatccgcttaaaggtaattagttactcagtagaaaaccaaaccttaggagttagattagagttcaaagatcctcaaacccaacagtttatcccggtactaaatgcatcaagtacaggtccccaaactgtctttcaaccctttaaccagtgggcagactatgtcttacctttgattgtaactgttcctatagtagtgattatccttagtgttactttgggattaacgattggaattccaatgcacagaaacaaaaaggcattacaagcagggtttgatctttctaacaaaaaggttgatgtcttgaccaaagcagttggtagtgtctttaaagagatcattaacagaacagggatctctaacgctcctaagaagttaaaacaagctaccccaaccaaaccaactcctaaaaccccaccaaaacctccagtaaaacaataagatgaaaacaatgagaaaacagatttataaaaaagcatactggttactattaccctttctaccattagcactagccaataccttccttgtcaaagaggatagtaagaatgttactgcttacacccccttcgccacccccatcaccgattctaaaagtgatctggttagtttggcacaacttgattcttcttatcaaatcgctgaccaaaccatccataacaccaacctgtttgtgttgttcaagtctagggatgtaaaagttaagtatgagtcaagtggcagtaacaacattagttttgattcaactagtcaaggtgaaaaaccctcctatgtggtcgagtttactaactctaccaacattggcatcaagtgaacgatggtgaaaaagtatcagttagatgtaccgaatgtaagtagtgacatgaaccaagtactgaaaaatttaattcttgaacaacctttgactaagtataccttaaacagtagtttggccaaagagaagggcaaaacgcaaagggaggtacatctgggtagtgggcaagcaaatcagtgaaccagtcaacgcaaccaacatgacctaaacaacaatcccagtcccaatgcttcaactgggtttaaactcactaccggcaatgcatatagaaaactaagtgagtcctgaccaatttatgaaccaattgatgggaccaagcagggcaaagggaaggatagtagtgggtggagttcaactgaagaaaacgaagctaaaaatgatgcgcccagtgtttctggagggggatcatcttctggaacatttaataaatacctcaacaccaagcaagcgttagagagcatcggtatcttgtttgatgatcaaaccccaagaaatgttatcacccaactctattatgcttctactagcaagctagcagtcaccaacaaccacattgtcgtgatgggtaacagctttctacccagcatgtggtactgggtggtggagcggagtgcacaggaaaatgcaagtaacaaacccacctggtttgctaataccaatttagactgaggagaagacaaacaaaaacaatttgttgagaaccagttggggtataaggaaactaccagtaccaattcccacaacttccattccaaatctttcacccaacctgcatatctgatcagtggcattgacagtgtcaatgatcaaatcatcttcagtggctttaaagcggggagtgtggggtatgatagtagtagtagtagtagtagtagtagtagtagtaccaaagaccaagcacttgcttgatcaacaacaactagcttagatagtaaaacggggtataaggatctagtgaccaacgacacggggctaaatggtccgatcaatgggagtttttcaatccaagacaccttcagctttgttgttccttattcggggaatcatacaaataatggaacaactggacccattaaaactgcttatccagtgaaaaaagatcaaaaatcaactgtcaagatcaattctttgattaacgctacgcccttgaatagttatggggatgaggggattggggtgtttgatgcgttaggtttaaactataactttaaatctaaccaagaacgtttaccttccagaactgatcagatctttgtttatgggattgtctcccctaatgaattgcgaagtgctaaaagttctgctgattcaactggtagtgatacaaaggtaaactgatcaaacacccaatcacgttacctccctgttccctataactattcagaagggatcattgatgcagatggatttaagcgtcctgaaaacaggggtgctagtgtaactaccttctcagggcttaaatcaattgcccctgatggttttgctaactcaatagctaacttctcagttgggttaaaagcaggaattgatcctaacccagtgatgagtggtaagaaagctaactatggagcggttgtgttaacacgggggggtgttgttagattaaactttaaccctggtaatgattcattgctttcaacaactgataacaatatagcacctatctccttctcatttactccgttcacagctgctgagagtgcggtggatctcactaccttcaaagaagttacctataaccaagaatcagggttatggagttatatctttgacagctccttaaaaccaagccatgatggtaaacaaactcctgtcactgataacatgggctttagtgttatcactgtctcaagaactggcattgaactaaaccaagaccaagctactacaactcttgatgtagcacctagtgcactagcagtgcaatcagggatccaatctaccacccaaaccctaactggagtactcccacttagtgaggaattcagtgcagttattgctaaagatagtgatcaaaataagattgatatctataaaaacaacaacgggttgtttgaaattgatacccaactaagtaatagtgttgccaccaacaacggtgggttagcacctagttacacagaaaacagggttgatgcatggggtaaagttgagtttgctgataacagtgtattgcaagcaagaaacctagttgataaaactgttgatgagatcatcaatacccctgaaatcttaaactccttctttagattcacccctgcttttgaagatcaaaaagctacccttgttgctactaagcaaagtgatacatcacttagtgtctcaccaaggatccagttcttagatggtaatttctatgatcttaactctaccatcgctggggtacctttaaacattggtttcccttcaagagtgtttgctgggtttgcagcactccctgcatgggtgatccctgtatcagtaggttcttcagttgggatcttgtttatcttgttagtcttaggacttgggattgggatcccaatgtacagggtaagaaaactccaagatgcatcgtttgttaatgtctttaaaaaggttgatacactcacaactgctgtcggtagtgtgtacaaaaagattattacccaaactggtgtggtgaaaaaagcacctagtgcattgaaagctgctaatcctagtgttaaaaaacctgctgcttttttaaaaccacctgttcaaccaccaagtaaacctgaaggggaacaaaaagctgttgaagttaagtcagaagaaaccaaaagttagtttttaacctttcaataacctaaaacacaatctttaaaacaaggttgtgtttttttgttttttgtcacttttcactaaacttgcaatttagagagtggatatgaaaagaacagttaaaaaaataaaacctgaccacttgtttaataaaaagcagtggcacttactgagtgaagagatcagtgataacccaatgattaagcgttattgactcaaacaacaaaagcgtcagcttgccaaactaaaaaaacgccgttattttaaaaattaactatgtattctactttaagacaatataaaccattgaaaagaaagaaatggttaaacaagatctcaaaacggaagttaaaacaactttataacaaagcttattagttttgttttttatttttactagtgcctaaggtggtattagagtaccacaagctcagtaaggatgtagtcaaagagagtttggaagtggaagcaactgattcttttgatcccacccaaaggttgcaaaaagatagtccaatgaaggattcaagtaaacaaggggagaaactcagtgaaacaactgcttcatccatgagtggtatggctacatctcctcgcaaggcccttaagatagaggtggagaaaggttcttcagggtctgacaccctcaccaaatccgactttgctaaaaagccactgaaacataaagaaaatagtgggacagaggtgaagttggatgcacagaaggattttgccggagagaaggcctgaaagccattgttgactactgatcaaatagcaagagagaaggggatgggggcgacttagactttctcccctgaatcggcaacaacaaacccttctccaactcccacactgcttccctttctgttagttcaaatacccccctccccactttttctaacatcaatgttggggttaaatcaatgatcactcaacacttaaacaaagagaacacccggtgggtgtttacccctaactcttcacctgacatctgaactggggctgggtatcgcaaacaaggtaacaataatggcatcccttttgataatgtgaaacctagcaatagtagtaccccctttaatcccaattcagatgataataaagtcacttcaggtggctcctccaaaccaaccacctacacccatttacccaacagtatcagtcccaccagtgactgaagcaatgcattgactttcactaataagaataacccgcaacgaaatcaactgttgctcagaagcttactaggaactatcccggtattgatcaataagagtggaacgggagatcaatttaacaaggatagtgagcaaaaatgaaacgaaacagataaattaggaggcaacctcccggggcttggggaggtgaatggcggtttttatcaactaaataaaaacttattagcttatttttattaggtttttacttatttaatagttaaaaaagttttgaatttttcttagttttttatttgtttaatagttaaaaaacactaggctttacctttatttaattaataaaacctttacccctattaccaaaccatccataacaccaacttgtttgtgttgttcaagtccaaggatgtgaagcttacatatagttcaagtggcagtaacaacattagttttgattcaactaacaacaaaccctcctatgtggtcgaatttactaattccaccaatgttggcatcaagtgaacgatggtgaaaaagtatcagttagatgtaccgaatgtttctagcaacatgaacgatgtactgaaaaatttaattcttgaacaaccccttaccaagtatacgcttaatagtagtttggctaaagagaagggtaagacacaagtagcggtacatctgggtagtgggcaagcaactaattgacgatcgatgcgcaactccatcagtctaaacaacaatcccagccccaatgcttcaactgggtttaaattagacaaaggcaatgcatatagaaaactaagtgaatcctgaccaatttaccaaccaattgatgggaccaagcagggcaaagggaaggatcaagcgaattggagttcaacagaagaatcaacggcagctagtgatgcgcccctaagtacaggagggggatcatcttctggaacatttaataaatacctcaacaccaagcaagcgttggaaagcatcggtatcttgtttgatggggatggaatgaggaatgtggttagcctccttcctctactttcaacccaacaaggtgaaaagtggtcaataccaaaccaccaacacctacaacaggttaattgaacctgacaagtgacaatcaaatagtgatttgactaacatgaccagcttgttaaaactcctaacaactaaaaacatcaaagcgaaattggggaagggaacagcaatgcagggaagcaagacaccttttccttcgttgtcccttattcagatagtcatagtaatcaaacttcatcaggaaccattaaaacggcttatcctgtgaaaagtgatcaaaaatcatcagtagcgatcaattccttgatcaacgctacgccgttgaatagttatgggacaataaaaaaactacctgtcaacaaaaaacaggtagttaattatttatccaattagtaagttgcctatgggttaacaaagagatgcacttaatatacgaccaacctaatttatttgaaagcgtatcttttattaatgaatgtggaactaagcaactattatttaaacacagcaaaagcgtgtaattttttattaaaagcgatttagtgggaacagaaataaaagattaacatgactttatacaacttctgttcccatctactaaattgcacaaaaaaagctttttgacaaaaaaatagttattttttgtaattgcttaatttaataacaaactaaactattattgttacttaatgattttttgatctatatagcacaattaatataacttcatgattgatcaaaacaagttaattactaagtgaaaaaaagcatttgcaaaagctaagaatttaactactttagttaatcttaagaacactttacacaacagtgatttaaagccattactccaaaagattaaaaccgctacaaaactaagtgaaaaaagtagtttaggtaagctttatcaatcacttgatattcaactaactgatctgttaactagttacaaaaaaacctttgaaataaataaccaagttagtcaaaaaccttcacttgatgtgatgctaccagcaacagagtttaccaatggttctaataacgcactatatcaggttattgataatttagttgaatactttaaaagctttttattcacaattaattttgatagtgaactgaccagtattagtgactgttttgatcttttaaatatccctaaagatcattccagtaggaatgaatctgattctttttatatcgataaaaccagtttattgagaacccattgtactgctaccacgctaaaagcagtcagaacttctaaaaaaactaataatcctgatatcagggttgtctctttaggagcggtttttcgtaatgatagtgatgatgccacccactcccatcagtttacccaacttgattttatgtggattaaaaaagggctttcattagctaatttaaagtggtttattaacaatatgatcacccatttctttggggaaaatacttttactaggtttagactatcccacttcccattcactgaaccctcgtttgaaattgacattaggtgttggttatgtcaaaatggttgttctatttgtaagcaaaccaagtgaattgagatcttaggggcggggatcatccatccccaggtgatgaataacatgggaattggggatactgaaaatattactgggatagcagcaggaattgggattgaacgcttagcaatgttaaagtatgggattgatgatatccgtgatttttatgataacaactttaagtttttaacccagtttactgactaaaatatgttgatatcaaaaaaaacacttggcgttttaatccctgacatctttagtttttctaatgatcaaattgcccaaaagttagaacaaatggggattgaagtggaatcaattaagcagtttaacagccctgattacctccaacttgcaaaggttgtatcaatccaaccccatccccatgacaacaagctttttatctgtgaattacaaattgataaaaacaagtttattaatgttgtttccaatgctaataacattaacaatcctgataatatcaacaagtttgtcattgttgcaaaaaaaggaactgagttactcaacgggttaattgttaaaacccaaaatattaaagggatcatttcagaagggattttatgtagctatattgacattaaccccttcagtagacagatcattgaaaaaacagaagttgctgatgcgattatcattgatcatgttagcaatgatcatgactgaaaccaatacctctcgtttttaagtttggatgatgtgatctttgatgttaaaaccccaactaacagagcagatcttcatagcttaatctttttagcaaaagaacttggggtacttttgaaaaccaaaacctttttaaaacaaaaaagtagtgttgttaaccatgacttttttaagtttcccctaaatttaaaaaacaagttaaaagcgaattattttggcggtttgttcttaagacaaattaaccaacatagttcaccttgaacagttaaaggactgttaattaaccaaatgatcaaaccagttaactattatgttgataaagctaacttagtaacagtgttcaccgctcagccaatccattgtcatgatgcagatagaattgttggtaacattgaacttaaacaagcaacccataatgaaacttttgttggacttgatgacaagcaatatgagattgaaccaggggatattgttgtttgtgatgagaagggcattattgcactggtagggatcattggttcaaagcgcacaatggtccaacctacaacaactaacatcttttttgaagttgttaactgtaacagtgaaaccattaaacaaactgccaagcgctttttgatcaataactttgccagtaagtttatggttaaaccgattagcttattagctactgataactgtttaaactacttacaaaacagtttactaaccactgataacattggcaaaattagccacttttcaagttcgcttaaagttgaaccatttagtaaaaagctcacagtgaatttccataagatacgccaactaattggcattgaaaaaaaggaactaactgatcaaaccattaaaaaaagcctcagtcaactagggtttaaagttgacaaccaacttctcaaaatccccagttacagacaagacattaatacctgacaagacattagtgaagagattgtgaagttaattgatatcaataagttaaaaccaattgggatcactagtagttttaactttgaaaagtccagttactttaacacttttaatgctttaacaaaactaagaaaaaagctacaaacacttggttttcacaacgttattacctaccagttaactgatcaaaaaagtgcaaaaacttttaatttgtttaacttagaaaatttcatcaccattaaaaacccagtgtcccaaaaccattctgtaatgcgtgttagcttaattgattcactgttaaaagtgctaaaaaccaataacaactataagaatgaactggtgaacatctttgagttttcctttattaaaacccaaaacaatagtgaactgcacctggcagtattatgagttgaaaaactgtttacttctagtttcaatcctatgcaagggataagcaatgatgtttttactatgaagggattagcaaaactcattgttgctaacttagggtttagttgtgactttgaaccacttgatgatagtgactattttgttaataatcaaagtttaaaaatagtagtttttaacgaacagatcggttttattgggctaattaaagaatcattgttaaataactatgatctgaacaataaacccatttattgtcttgaaatcaacttagataggatgctctcttctctaaacaggattgaaaaaaactaccttggttacagtaaactacaacctgtttgcaaggatcttacctttagttttaccaaccctgctagtcactttgatcagtttgctaacatgatcaaaaggataactggcattgaaagttgaaagttaattagtgtctttgaaactatgcaaaacaaccaactgatcactaagtacaccgttcgttattttctgaaaaatgatgctaacaaaccactaactaaccaaacaattgaacttatcactaataacttaaaactccagtgtgaaaaactaaaaattaaattagatatttagaattacttattactatcaagatagttaccaactattttgttagtaaaacttaatacaattggcacaaaacgcaaaacacccttctaaaaaagaacaaaaaccactcgttaatgaacagattgctttcaatcagttcactttaattgatgaaaacagtactaatttagggatagttaagatggaaaacgctttaaagttagcacaagaaaaacagttagatctagttctaattgctccaaacccaaccaaaccgatcgttaagttgttggactttggcagatatacctatgatttaaagcgtaagaaaagacaagccaagaaaaaccaaacaatcatccaaaccaaagaagttgttgtcaaaccaacgattgctaaacatgatttagaatttagagcaaaacagagtaagaattggatagaaaaaggtcatcatgtcaagtttatagtccgtgcctttggcagggttagcaccaggatagagttaattgaaaaggtgtttgatgacttttaccagttagttaaagatgtagttgagatccaaaaacctttaaccgcttcttccaaaacgatgtacgctgctctattagtacctttaaaaagatagttatgaaaaccaaaagtgctgcagtaaaacgctttaaactcaccaaatcaggacaaattaagcgcaaacacgcttatacttcccacctcgcgccccacaaatcaaccaaacaaaagcgccatttgcgcaagcaagctactgtgagcaacagtgaattgaaaagaattggtattttaatttagttatgcgtgttaagggaacaaatacaaccaggattagaagaaaaaaatggttaaaacaagctagtggtagctttgggacaagaaaagcttcttttaaggcagctaaacaaactgttatccaagcaagcaagtatgcttaccgtgataggagacagaaaaaacgtgagtttcgttcgttgtggatcttaaggttaaatgctgcactgcgtgcacaagggatgacttattcagtgtttatcaatgaattgaaaaaagccaagatagtcattaacagaaaggtactttctgaactagcaattaaagaacctaataagttaaatctgattatcaataccatcaaaaaaccaactaataaaccaactgttgcaaaaacttagtaacgtttttaaagttaagttttgccacctgtttaaactgttcaatttgactaaaaccgcgttgttggttaagaaataacaacgcttgttcaatgccatgactactgcctttgggtaaatcatagtttaccttttggttgagtaattgcagctgattaataaagctatctcttgctaagatagatgcagctgcaatcaccagtgacttagtttcaccattaattagaaactgatcaggtaataacactgttttatcagtgaaattagttagcttatttagatagttaacaaataactcttgattggcaaactggtcaatgctaattgttactgtttgtcttaataactgatttttttccagtaacttttggtaaagctgacagtgtaaattggtcaaaagtaaattggtatttttcagtgattttgtcaaatcattatactgcttgggatctaatgtaattgtatggtgatccattactgttgtttggatcgatttagctaacagtttgacagtgtgatcactgagtttttttgaatcagttacttgtaaattttccaagattaataagctgttttttttcaattaaaacagcactaacacaaatcccaccaaaactatcacccttgccagattcatcactgccaattaaataaaaatcagctggtttgtaatgttgcaactatctagttaattaataaaattatacttactctgattgattcttaatggctgaacagaaacgtgattattatgaagtgttaggaataacccctgatgctgatcaatcagagattaaaaaagcctttcgtaagctggctaaaaagtaccatcctgatcgtaacaacgcgcctgatgctgctaagatttttgctgaaattaatgaagcaaatgatgttttatcaaaccccaaaaaaagagctaactatgataagtatggttttgatggggttgatggtgaacctgcttttaacttccaagcagatgtttttcaatccttttttgaagagatagcaaaatcaggggtttttaacaaccaaaccaatcctgaacaaaaagaaaaaaagaaacgttaccactggttctccaaaaaacctaagcaagaacaacctgaaattaacttagatcacgttgttgagcaaaccattaaaaaggtgcaacaaaaccaaaaccaaaacaaagacccagatgaattacgttctaaggtccctggagaggttactgctagtgattgggaagcattggttggtgatactaggtatgggtattttgatgaaacaggggattggagttgaaagggttactttgatgaacagggcaaatgggtttgaaacgaaccagttgattctgaaaccagtgaggtatcagttgaacctgaaccaaccccagttgcccctgaagctagttttgaagaagctcaacctgaaattaatgctgaaccagaagctagttttgaatcaactccaactccagaaccagttgccccagaagctagttttgaagaagctcaacctgaaccaactccaattcctgaaccaatcccaaccccagttcaagttcaacccctgttgttagatctcaacctctttactatcccaactaaagctactaaggatgatcttttgtttgacaacattaacctcactacctatgaacaagttgttgattatctcaacagtcaagcaacccctaatttagctaaaaccgatggtgaattgcaaacgattgatggtaccaacccattgttattagaacagtgcaaaaagatcaaaaaacaagcagaacaactctttaaaaaactctttttaaaaaaacaactccccttcatcacccaacctgaagttgttgaggaaagtaaaaccagttttgatgagaacaacgttaaccttgtttactttgaaaaggtccctgaaatccttttcattaaccaacaacctaaggaggtaaaatacacccgtcaagtctttgatgggttgacaaacaaaacaactagtgaaacgattacactagagatccaactcctccaaaccccaaaagagactgttagtgccatttttaaaggctttggtaatgaccatggcaagggctgtggggatttaaagattgtttttgaaaagattaaaagccccttttttcaagtcaatgaggatggcttgcactctgcttgcatcattgaccctttagttgcttacaacggcgggattatcgatgtgtttgggccctacactaacttccaagttaaggtagatggggagatagacatcaatgccattatgaagtttgaaaaactaggcattgctaaaaccaagcgcaagggcgatctttttgtccatctctattacagtagtgtccctaaaaagaaactcaccactaacccccaagttcaacagttcttagaacttttacaagctgaatatgaactgttgcaagacaacatcaagagcttaaagtactttaaaaataacctagttatccccaaaaagccacttgatcaacaaagctatcaatacctctcccaagaacccattagttagaatttgttaatatgtgtgaaaaatcacaaacaattaaagagcttttaaacgccattagaaccttagttgtcaagaacaataaagctaaggttagtatgattgaaaaggaactgttagcttttgttagtgaacttgacaaaaagttcaaacaacaactcaacaacttcaatgaactacaacaaaagatcccactactccaaaaagctaacgaagagtttgctttaaagtttgaaaggatgcaacgcgaagcacaaaaccagatccaagccaaactagatgagttgaatcttaaaaataaaaaggagttagaacaagccaagaaatatgcgattgccaaaacccttgaccaacccttaaacatcatcgatcagtttgaaatcgcgctttcatatgcccaaaaagaccctcaagtaaaaaactataccactggttttaccatggtacttgatgctttttcaaggtgattggaagcaaatggggttaccaagattaagattgaaccagggatggaatttgatgaaaagattatgtctgcattggaactagttgattctaaccttgctaaaaacaaggtagtaagagtctcaaaatctggctataaactctatgacaaagtgatccgctttgcatcagtatttgtcagcaaaggtaataaaaaatcataataacaacttatgagtgaacaaaaaagaagaacaatccaaattgcgataagtgaagaccactatgaagagttacaaaaggcattggaactacttaaagggacccaattacccttttcaaccactgttgaacagtttgtggagttaatcttatctaactatgtagctacttccaataagattagtagtttagctaagagtggttttgatgtagcttcattgcagcaagaacttgagaagataggtaaccttagtggggttgatgataacctcaagggttttctctcagaactgttgaaaacctcaaggaatgggtttagtaaccccaataaagatggcaaaaaaaatgatgacgataataactcgtcatcaaaatcatagttatataaaactttaagtggtgccgaataacagagtcgaactgttctctgatccttaccatggatctgttttgcccctaaaccaattcggcagcaaagctaatttcaattttaaattcaaactttagatgaaaagtaactacagtgcaactaacatcaagatcttaaagggtttggatgcagttaaaaagcgtccggggatgtacattggttctactgatagtaagggtctgcaccacatgctatgggaaattcttgctaacagtgttgatgaagttttagctggttatgcaaccaatattactgttactttagatctcaacaacaccattactgttagtgatgatggcaggggtattccctatgagatccaccaagacagtaacatctctacgatcgatacagttttcacctttctccatgcaggggggaagtttgatgatcagtcatacaaactagcagggggattacatggggttggtgcatcagtggtcaatgccttaagtgatcatttagaagtaacagtgaaaagaaatggtcagatctaccaatcagtttatcaagctgggggtaagatcatccaaaaagccaaaaagattggtgatacaactagccatggtaccactgttagtttccatgctgaccctaaggtctttaaaaaggctcaatttgatagcaacattattaaaagcaggttaaaagagctaagctttctgtttgctaaactaaagctcacttttactgatcaaaaaactaataaaaccactgttttttttagtacctcaggactagttcagttccttgatgaaattaataatactgtagaaacacttggccaaaaaacactgattaaaggtgagaaggatgggattgaagtggaagtggttttccagtttaaccaatcagatcaagagacaatcttatcatttgctaactcgattaaaacctttgaaggagggagtcatgaaaatgggttttgtcttgccattagtgatgtgatcaacagctattgcagaaagtacaacttactaaaagaaaaagataaaaactttcaacttagtgagatcagacaagggttgaatgctattatcaaagttaacttacctgaaaaaaacatcgcttttgaaggacaaactaagagtaagttgttttcaaaggaagtgaaaaacgttgtttatgaattggtccaacaacactatttccagtttctggaaagaaacaacaatgatgctaaattgatcattgataaactactcaatgctagaaagattaaagagcaaatcaaacaacaacgtgagttgaaaaaaagtttatcaagtccccaaaaagagaagatcttatttgggaagttagcaccttgtcaaaccaaaaaaaccagtgaaaaagagttgtttattgttgaaggtgatagtgctggtggcactgctaaaatgggccgtgatagaatttttcaagctatcttacctttgcgcggcaaggtgttaaatgttgaaaaaattaacaataagaaggaagcgatcactaacgaagagatcctcactttaatcttttgtattggtacagggattttaactaacttcaacatcaaggacttaaagtacggaaagatcatcattatgactgatgcagataatgatggcgcacacatccaaatcctcttacttaccttcttttataggtacatgcaacccttaattgaactgggccatgtctatctagctcttcctcctttatataaactggaaaccaaagatagaaaaacagttaaatacctctggagtgatttggagttggaatcagtcaaactaaagcttaataacttcactttacaacgatacaaaggacttggagagatgaatgctgatcagttgtgagatactactatgaatccaactaccagaaagctagtgcaagtaaagcttgatgatctaattaacgctgaaaagcaaatcaacatctttatgggtgaaaagagtgatttgcgcaaacactggattgaagccaacattaactttagtgtggaaaactaatggatcaaaaaaacaacaacctctttcaaaaggcaattgaagaagtctttgcagttagctttagtaagtatgctaaatacatcatccaagatagagctttacctgatctaagagatgggttaaaaccagtacaaagacggatcttatatgggatgtttcaaatgggcttaaaacccaccactccctataaaaaatcagcccgtgctgttggggagatcatggggaaataccacccccatggtgatagttccatttatgatgcaattatcagaatgtcccaaagctgaaagaacaactgaacaactgtttctatccatggtaacaatggttcagtggatggggataatgctgcagcaatgcgttacacagaaacccgcttaagcttgtatggatttgaactattaaaagacattgataaaaagttagttagttttatcaataactttgatgatagtgaaaaagaaccaacggttttaccaaccttactgcctaacctctttatcaatggtgcgagtgggatagctgctggatatgcaactaatattgctccccataacactaatgaactattagatagtctttgcttgcgaatagaccaacctaattgtgaacttaaacaaattttaaaaattgttaaaggtcctgattttccaacagggggtaatgtttattttgaaaagagtttaagtgatatttatcaagcaggcaaaggtaaatttattatccaagctaagtatgaagttaacaagaacttaaaccagattgaaattacccaaatcccttatgaaacactgaaagctaacattgtcaaacaaattgaagagattatctttgacaataaactatctgctattgaaagtgtcattgatagttcagatcgcaacggcattaggatcattattaaacacaaggactttttgcctgctgagaagatcatggcctttttgtttaaacacacccaactccaagtgaactttaaccttaataacaccgtgattgctaaccgctttcccatccaaattggtttactaagttacctcgatcattttttaaagttttgtcatgaactaattattaataaagctaagtatgaacttgagcttgcaagcaagcgcttggaaattattttaggactaattaaagcgattagtatcattgataaaatcatcaaattaattagatcagcagttgacaaaagtgatgcaagagaaaagttaattgataactttaaatttacttttaaccaagcagaggcaattgttagtttgcgactttaccaactaactaacactgatatttttgaacttaaccaagaacaaaatgaacttgaaaaaactgtgattagttcagagcaactaattgctagtgaaaaagcaagaaacaaactcctaaaaaaacagtttgaaggttataaaaagcagtttcaccagcaacgaaggtcacaaatatgtggctttattaaccaaaaaaaggtggaggaaagtgagctaattgaaaacaaaacttatggggttttaatcactaaagctggtaactaccataagtttgaatctaaccaactattaaaaagcaccactgattttaaaagtgagagtgacacaattatctttgcacaaactattgctaataccgaccaaatttttattgtcacttcactaggtaacattattaatatccctgtttataaattagctttcaattccaaaaataaactagcaagtttagttagtaaaaaaccaatccttttggagtatgaaacgattgtttttgttggaacaatgaacagtgtaaaccaaccaatccttgttttaacttccaaactaggaatggttaaacggattgatttaaccaaacttaacattaagccacttaaagctactttgtgtatctcactccgtgataaagaccatttagtaagtgcatttttacaacaagatgataaactgatctgtttagtgtctgatcacaactattacactgtttttcacaccaatgagatcccattaattagtagtaaggggatgggagtgaaggggatgaagttaaaactagaggatcaaattaagtttgttgttgcttttgaagctaatgaaccgttagtgatgatatgtagtgatggtagtgtcattaacttaaaacaaactgaactagttgtagttagcaggatggcaactgcaaaaaaactgcctgttaagaaagcaattaactattgttttagtgatgcaactaacacccagttaattaattttcagggtaagaacggtagtaaattaattacaactagtgaactgaaccagatgagtaaaactgcaattagtcaaaccaggtttaacaaacttaattaggtttggttgtggatctttttatcatatttttctatctcttcttttagagtagttaataaggctttaatcttttggtagtccattctggttggtcctactatagcaagttggtgcttggcttcactggtggtattgattaaagtagaagcaactgatatctctttaaaacccaattgatcaccaaagacaatgttggtcttttggttggtttggtttatgaatgccatctgttgtcaaacactagtatcttcaagcagatttaagattttagtgagtttctcttggttagcaaactcgggttgtttagcaaggtattggatcccatagatctttttatttgcctcaatttgatctaaatcaaataacttaaataagatctcatcaattacatactgatactcatgaaccttggttctaatgatctcttttaaaacttctagttggttgttaatctctgaaaagcgggtatcaatgatgcgatcattaaagatccttacacaaataacaatgtcttcaaactgcctttggttagcatagctaatggtttttttaaagactttaccactagcggagaccaataaaaataaggcaaatgacttatcaaggatgatcagatcaatcttttttaaaacttcatcactactaaagttagttaacactactggtaggttaatgatctcattgataaacttaaccccaagttcaatcacctcatcaatcgttttgtgttgctggagaataacacttcttaagcgggttttcagatcgttagtggtgttactaacatttaacactttgacataatactgataaccaatttgggaaggaacacggcctgaagagatgtggtttttctttaagaacccttttttctctaaagctgccatctcatttcgtaatgttcccccagagaggtttttaaaatattttttggttagtaatttactgccaacagggatagcataagcaatgtattcattgataattgctttgagaatttgggcttgccgtggcgttaaattcttcattagttatctaattttatcttttaacaataaccagcttgaccactaatctaaaacaaaagttaaaaactgcacctaaaaaaccggggtgttatttgtgaaaagatagtaacggtaaagttttatatgttggtaaagctagtaatattttcaacagggtccaccagtattttcaaaagaataatccttataaaacccagctattatcaagccaaattagtgatgttgattttttcattctcaaagatgaaaatgatgctttaaatctggaagcaaagctcattaatcaatatcaaccccgctttaacttagttttaaaacaaaacaatggttatctttatttttatatcactaaagccaaaaaacctaccttggaattagccagaaaataccagattaaaaccactaagtgctttggaccgtttgcttcaagtaagtttaagttacgtgagatccatgacctacttttaaaactctttcctttaagaaagtgtgcacctcaccaaaaaaaccacccgtgcttttattttcagatgggtttatgtatggggcaatgtatgcaaactgatactaaggaaaaataccaacaggtaattagtaacattgaacagttttttaatgaccctagtgtggtaattaactatttaaaagctgcagaaaaaaaggcaagtgataatcaggaatttgaaaaggcccagcagtttctaacactgcaaaaagcagttttagagttaacaaaaacccaccataccactatcattaaacaaaaatcaagccatgattttattgggtatgtctttcaaaataacgttttggccattaccattttttgttatgaaaaaggggagttaactgataaagaacaagcagtgtttaccctagagcaaactgacattgtggaagttgaaagtgctattatcacctttatctaccaccactataaaactaccccacttccaagtaagattactgtttcacttgatgaaactaacctaaaacttattagtgatagcttaaaaattggtgtttttaagcccaagaatggtaatgaaaaactgatcttacaaactgttattgataatgccaaacatgcacttgcaaccaagtggttgaagtttactagtaactatgataaaacccagctccacaaggatttagcacaacttctaaatactgattatatccatagtcttgagattattgatgtgtcattctatgatcaaaaccatgttgttggttgcatgttaaggtttgaagatggtaaaaagatcaaacacttatcaagaagatacaacattaacagtttaaaaaaaggtgatactaaccacattgctttacttgtttacagaaggatcttaagtgcgatgcaaaccaaagctaacctcccttttagtgatcttttaattattgatggtggtaaagcacaaattaaaagtgttaagcaagtttttagtctcttcagtaatgttaaaccacccattatcattggactagttaaaaacaaaaaccaccaaactgatcacattatgttatctgatttccaagttaaaaagatagcaattaactccccactctttcactatttagcaacaatccaaactgaagttgatggttttgctaaaagaagtgcttttaataagttaagtaaccaccaactgcaaaacccgttgctacaaatcccaggagttggcaagataactgcccaaattctctttgataactttcaaacgctcaataacataaaattagcttcagttaatgagttaagccagtttattaaaaaaccattagcacaaaagattaaaacttactttgcaaaacaaactgattaaggttttggtaattgctgatacccatggtcaaaaccagaggtggattgaactgaaaaactaccataaccctgatgtgattatccatgcaggagatcacatgaccactaaacaattcatggatcaaaatgctactttttgagtggcaggtaacaacgattcaattggcaatgaaattgaaattttccagttagggcaaattaactttgtgttaatgcatggtcaccaagcaccaagagataacctgaaaaagtggtaccaattattagttttaaaagcacaacaatacccttgtgatgttttaatctttggtcatagtcacattgaatataccaacaaaattaatatgatccagttaatcaaccctggttctctacaactaccaagaaaccaaaccaacaccccttcatactgtacctttattgtcaataaagacgagctaactgatctaactatccactattaccaagcttcaaaagttagttaacaggatcttttagatagataggttgtaaggttagaggatcttcgattctttcaaagtgatcgatgttgcttaataacagcttgctataactctcaatgttttcaaagttttcatacataggaagttcattgtttgccttacataacttcacaaaatcagctttactaattagctttatttcactagtagtttggctgtatagtccacaatagttctgatcattaccacaactaatcttgctaatcccatgttcatatgggatttgaaagcggagtgaatttaaagcataaagttcacaactgggatacaataaacaccagcttttagcaatgatagttgctatcctctgaccggtgaaactaccagggccaattgtgacataaaactgtttaatactgctttttttcaacttgttttttgttaacattgtctccagataataaacagcaagttcagttaagttctgttcaacaccaatggacaactcatcaaccactgcattggttttcatctctaaaataatgatgttaagggttttataagcacagtctaaaaacagcttatacttacttaaaaagaacatggagtggatcggttaaagataagtttaaactcttaagtttcgttgaaaacttaggttcaagtggggcgtgaaagtccataggtttgtttaaagtgggatggataaaacagatcctgtttgcatggagaaactgaccatagctatctttcttttcacttttaattccatacagtggatcattataaactggatgttggataaatttcagatgcactctaatttggtgggttctacctgttaacaattccaagctaattagtgctgctttttcattctgattaatcactttaaacttagttattgcttgctttgctttagcagtttgggctattttaaacattaccttgttgttattaacccttgctaaaggtgcattaattgaaccagttaaggcattaaaagggaagtggactagtgctacataataacgttttaaggtgcgattttgcagttgattttgcaaatttaataagcttgcttggtttttacagacaacaattgccccactagtatcacggtccaatctgtgcactaagtaaacagggtttttgttgttgtgaaagatacaagcagctaacaagctggctttttcattgaaagtggtgggatgggttaacaaacctgatggtttgttaataaccatcaaatccttgtcttcaaaaagaacctcaagctttaagttataaggttcaacactagtaatgaaatcactagttgtctcatcatgaatctcaactttaattacatcatcttttgcaactattaaactgtttttaaaagttagtttttcattaactttaatctgtccattcatgatcagcttcactacctttactcttgaaaggttcagtaagctagctaaaagactatctaagcgtttggtagttgtaacaacaaaacactgtttcattactggtttttggaatgtttaaactctttgaacatctggattaaaaaacaaaagaataaacctataaaaccaaaggtaatacaacaatcagcaaagttaaatactgaactaccattctgaaagataaagtaatctaacactgaatcattagctgaagttaaacgatcaaagaagtttccaagtgaaccaaatgctaaagttgtaattcaaaagatgtaactatatttcaccataaaaacaagaaaaactaacgcaattactgataataatccctggagaaagtaaactaagccagtttggttttgtaataagctaaaccctacccctttgtttctaatcacatagatattaataaaaccactatttgctaccatggtgttatccatctcaccatttaacgcatttcttaatatgaaaacttgcagtaagataataaagccaacaaacccaatcattgtcagtttatagaataaaaatggtttttggtttgcagttaaaacctggtgtttaagttgtgaaaaaaacttggtttttcttaatttcatctacttgtatattcagttaaaattcactaattaactaacaaaaattattaaggagtattaacacttttttactagtttttaaactaacttttttaagtgtaatcctagtttaatttctggtagttttctttactaatagctacttgtaaaaaattaaaagttagaattaatggcactatttagtatatagatatcaggctttggggaaaacaaaaaacaaatcagactgacagatctttctagaagattaccgtttttattttgaaacagattttgattgggttacatacctgaacaactgtttaaacagctatcctgattttgacatcatcaagttcattaagaagtatggccctgagtgtgaaaagagctttctaagctgacagagcaaagctaagagtgatgtttacagtgaactgactaacaagattaaaaaacaacagttctcagaacagttaatttaccagctagtccaacttgatgctttacgaactaactatttaattggttcgttgttttcagataacaaaacccagcgcaaactcctgaagcgttcttgaaaaaatgctaagaaagaaggttatacaaaacaagaatggttgatgatcttagttggtttaccctttgaaaaaggtgcttatcataagcagttatatgaccattcacgtcaggagatcttagatcttactgaagttattaaaaagctttatctaaaaacagagaccaacaacgataagcttgagtttgctgcaactactagtaaaacaacagcgcagctaactaaaactatgcccttaaacagtagtgatcttgataaggatctaatggagtttagtggtgagaagtgaggtgataattagtgcctaagattgaagttaaaaatgatgatttagagctagctttaaaaaagtttaaaaggatatcactggaagtacgcaggttagcacaacgccatgaataccacttgcgcaaagggatgcggttaagagaaaaacaaaagatagcacagaaaaagcgcaggaagtttcgcagtttagctagccattaagatggataataaaaacccccagaaacttattactagtgaattgttggcaaaccaccgctttaattttgctaaagatgataaaggtgggtatgatgctaatgaagttgatgcattcttagatcaactaaccaagactttaatccactatgaggagatgaaaaacaacgaacaagaattgaaaaatgcttatgacaagttgttttcagatcgtgatcagattttaagtcgttgtgctaaattagaagctgatttaaacaccttttatgaaaatggttatgcaaacaaggtgttaattaaccgggttcaggagttggaggataaacttgaaaaactacctgatcgttacactgaaaaactagaaaggattgaaaaactgttaaaaaaggtcattaaacactgaactgatggggaggacattagtaactttgaagatgagtttttttaaagatggttgttgggatagggattgatgttgtgcaattaaagcgcttcttaactttagttgaaactagtgattgttttgctaaacgattgttaactagcaatgaactaaacagttattgaaagctaaacaataaccaaagagctaattttctagcagtgcattgaactttaaaagaagcgatttataaagctaccagtcacatcaaaccacttttcactaaacttgaaatttataaacttaacaaccagtaccggtgtgaatttatccaaaacatcaacctgttgttatcagttagttacactaattgccatgttagtgctatctgtttagcacaacaaaatggataaactatttaaaacaagttttagattcataataaggtttttacaaatcctgagtttaccagttgtttttccttactttttattaagctttttagcttgtttaattactagtaaaaactatgaatcactcccttataactatccccctgaaatccgattcaaaaaggtgtatagattggtatcaatgtgactttacattaagggaattaaagtagtgacagtaaatgacaagattatccctaaaaaaccagttttagtggtagctaaccacaaatctaaccttgatcctttagtattaattaaggcctttggcaggttgaaaaatagtccaccattaacctttgttgctaagattgaactgaaagatacagtcctttttaaactgatgaaattaattgattgtgtttttattgatcgaaaaaacatcagacaaattgccaatgcattggaaacccaacaacaactaattcgccagggcactgctattgctgtttttgctgaagggactaggattttaagtaatgacattggggaatttaaaccaggagcactaaaggttgcttacaatgcttttgtacctatcttaccagttagtattgtgggtagcttaggaaagatggaatcaaacaaaaggctaaaagaacatggtgttaagaaaagttcaaactatgaggttaaagtaatctttaacaagctaattaacccaattagttttaaccagattgattctaataaccttgctaataacattagaagcattattagtgatgcatacactagtgaaaaaccaagcaatgattagtttaatttttgataaaagcaacagttttaacccccaactttgtgttgaacttctcaaccactttaaagtggttatgctaactaaaaccatcgttgttgactatcccagctttcaagcatgaaaagcacaactcaaaccgtttaaattagcagtttttagtgataatttgcaaaccgaattaaccccaaattcaaaactcacagtttttaacaactaccagcaacttttagttgataataatgacctaattatctttgcaacccccactttagttcagctttttgataatgagattgaccagttaatagttatcaatcccactagtaaatctaaagatcagtttaactgtaattgaaacgactttgttttaattaaacaaactaatttcaagaaccatcaagttggttattttgataaaaaaagtagttatgaaccacctttcactgttgttacagaccacttctttgggaacctaactgatttatttagtcttttagttgataaaaaggtaagtgtaaatgatgtggatattggcttgatttccttacaatatctcaatatcattgcaaattacaccaataaaaaagccattgaaaagatcactgattatctggtgattacaagcaaaattctcgctaaaaaagcagataatctgctcaatgatcatcaggaagagagtgtgttggaatatgatttagctactaataactttcgtgataagatgatcgctaacttagtggaacacaaacgctattgtgattcactgggtgaatttgaaaaactcagggttaaccgcttagcttacttttccaaagctaatgagatggagcaatttatcaaaacagctaatgatcaacttgttacagttgaagatcaactccctaactatattagtgtcttaaaactctttcatgctatgaacaagttactggagatgagactcagctctcttctaacaaataaaaacatcaccattaaagagttatcagttgaacaggttcaaaaggagttggttttagcaatcaaacagtttaactaccaaacagtttctttaaagcgggtgttattaaaacttaaccatcctatctctttaatgtattttgttactgcttttgtggcacttttagtgctattaaacaaccaggtaataggtttggaacaaaaagattatcacagtgaactttacatctttttactagatgaaaaccaactgaaaaccttccaagaatcaccagatgaaatggtaaaaagaatccaagctcaacaacagcaaaacgaactgataattgctaaaaacaagcaactaagagctatcaaaaacaaacaaaagcgagctgattatctaaaaaagaaatatggtgaaaattacttagataaaactaacttaaaagatgaaaacaacaattaatattgccacccctaccctaaaaaaacctagcaaagaagctaacttggttgctagtatctatgggttgttatttgtttgtggcgcgaaagggatcactttaagagaactaattaggatctttaaaaaagcagggattgaaaaggtgaaattagcactcttagcacttgaaaggaagttagcagatgatgagcaatcaggagtggagttgaaaaaatttggtaatagtttttctttggtaacaaaaccaattatcaaagactatctccacttattattggctcataaagtcaaaaatccccttaattccaaagcaatggaagtgttggctatcattgcttacaaccaaccttgcaccagacccagaattaatgaaattaggggagttgattcttttcaaattgttgatgatctaatagcaaaagagttaattgtggagttagggagaactgataaaccaggtcgaccttttatttatgaagtgtcagctaagttctatgatttatttggcattgatagcttagatcaactccctaagattgagcattttgatcttgataaatttaagcaaggtagcttttttgattccaaccgctatggtgatgaataaccttatataatttacaacatggataaaatagctattttaacttcgggtggtgatgctagtgggatgaatgccaccatcgcttatctaaccaaatatgcaattgcaaagcaattggaagttttttatgtaaaaaacggttattatggcttgtatcacaaccattttatcaccagtaaggaacttgatttaactgactttttctttatggggggaacagtaataggatcaagtcgtttcaaacagtttcaagatcctagcttacgaaaacaagcagttttaaacctcaaaaaacgtggtattaacaaccttgttgttattggtggggatgggagttatatgggtgctaaagcactcagtgaattaggattaaactgcttttgtttacctggtacgatcgacaatgatgtcaattccagtgaatttaccattggtttttgaactgctttagaagcaattcgggttaatgttgaagcaatttatcacaccaccaaatcccataaccgcttagcaatcatagaagtgatggggcgtgattgtagtgatctgaccatctttggggggttagctactaatgctagttttgttgttactagcaaaaatagcttggatctcaatggctttgaaaaagcagtgagaaaggtgttgcaattccagaactattgtgttgttttggttagtgaaaacatctatggtaagaacggtttacctagtttagaaatggttaaagagcactttgaaaacaacgcaattaagtgtaacctagtttcactaggacacacccaaaggggctttagtcctaatagtatcgaactctttcagattagtttaatggctaaacacacgattgatctggttgtaaataatgccaacagtcaagtaatagggatgaaaaacaaccaagcagttaactatgattttaacactgcttttaatttaccaaaagctgatagaaccaagttacttaaccaagttaacactgcaattatttaacgatgattgaccatttaaaaagaacaaagataatcgctacctgtggcccagctttaacaaaaagcttggttagcttaaagatgcttgatgataatgagtatgcagctattaaaaaggttgcttatgccaacattgaagcaattattaaaagtggggttagtgtgattaggcttaacttctctcatggtacccatgaagaacaacaagtgaggatcaagatagtaagggatgtagcgaaagcaatgaacatccctgtttctattatgttagatacaaatggtcctgagatcaggatagtagaaactaaaaaagagggtttgaaaatcaccaaagatagtgaagtgattatcaacaccatgagtaaaatgatcgctagtgacaaccagtttgctgtcagtgatgctagtggcaaatacaacatggttaatgatgtgaatataggtcagaaaatccttgttgatgatggtaagttaaccctggttgtcacaagggttgacaaacaacataaccaggttatctgtgttgcaaaaaacgaccacacagttttcactaaaaaaagacttaacctacccaacgcacagtactctatcccttttctcagtgaaaaggatctgaaggatattgactttggtttaagccaaggtattgactatattgctgcctcttttgttaatactgttgcagatattaaacaactgagagattatctgaaattaaagaatgctagtggggtgaagatcatcgctaagattgaatctaatcatgctttaaataacattgataagatcattaaagctagcgatgggattatggttgctaggggtgatttgggccttgaaatcccttattaccaagtcccttactgacaaaggtacatgattaaagcttgtcgcttttttaacaagcgttctattactgcaacccaaatgcttgattcactagaaaaaaacatccaaccaacccgagctgaagtgactgatgtttactttgcagttgatcggggtaatgatgcaactatgttaagtggggaaactgctagtgggctttaccctttaaatgcagtagcggtgatgcaaaagattgataaacaatcagaaaccttctttgattaccagtataacgttaactattatttgaaaaactccacggcaaataaaagtaggttttgacacaacgttgttttacctttaacaaaaaagactgttcctaaaagaaaacttgttaacagtgcctttaagtatgactttattgtctatcctactaataacattaacaggatctatgcattatcaaacgcacgcttagcagcagcagttattattttaaccaacaacaaacgggtttacactggccatggtgttgattatgggatcttctgttatttaattgataaaaaccccaaccagctaaccaaagctgaactgattgaacttgcttgaaaagcaattaaccactatcaggcttatggtgatttagaaaaactcaaacagtgtttagctgtctataatgaaacaattatcaatctttagataaaaattggtgagagtttgtaaaatattgtacacggtgccttagccaagtggactcaaggcctggagctgcaacctccatatcgtcagttcgaatctgacaggcacctccatgtacatgaaagttaactactctccatgtgcaaacgggaagtagcttagtttggtagagcacttggtttgggaccaaggggtcgcaggttcaaatcctgtcttcccgaccaaaaggctggatacctcagttggttagagggcccggttcatacccgggttgtcgtgagttcgagtctcactccagccaccaaagttacttaaatattaaaggatctatagctcaattggttagagcccccgactcataatcggtctgttacaggttcaagtcctgttagatccaccactttgctgtgttagaatcatatttgccgcaattttgtggagacttacccaagcggctgaagggttcggtcttgaaaaccgagaggtgctttataagcacgcgagggttcgaatccctcagtctccgccaaataatatttaatcgcgggatagagcagttggtcagctcgtcaggctcataatctgaaggtcgagggttcaaatccctctcccgcaaccatggttccatggtgtagtgataacatatctccctgtcacggaggggttgcgggtttgattcccgttggaaccgccattggtcttgtagctcagtcggtagagcaacggtctgaagaaccgtgtgtcggcagttcgattctgcccgagaccaccattaaaagtttttaaaaaagccctaaaaaggggcttttttagtgttaccaccaattaaaatatttttatagcaagcagttgcatatttttaatataagttagaattattggtatagtgtcttcagctgtttaattcatattaaagcgcatggaaaaaaatagatcagcttttcaacaaaaccaacaagcatcaaaccaaccttttaaccaagatcaaaaccagtattaccaagatcctaaccaacaacaatttaaccaatctggttttgatccaaatcaacagcaatttaatcaaccaggatttgatcctaaccaacaatattatcaagatcccaatcaacaacaatttaatcaagctggttttgatcaaaaccaacagtattaccaagatcccaatcaacagcaatttaatcaaccaggatttgatcctaaccaacaatattatcaagatcccaatcaacaacaatttaatcaagctggttttgatcaaaaccagtattaccaagatcctaaccaacaacaatttaaccaatctggttttgatcaaaaccagtactatcaagatcctaatcagcaacaatttaaccagcctagttttgatctaaataaccaacaatttaaccaacctggattcaaccaatccccagcatttgaaatcacacctcaagagcaaaaagctgaacaggaaatgtttggtgaagaaccacctcaagtagttagagagatccatgaactaccatttgaaaagatccgttcttttttacaaagtgattttgatagctataactttcgcttaaactcacttaaaagcaaactggataatgccttgtattcacttgataaaacaatccaaaacaccaatgaaaacactgctaatctagaagcaattagacataacttagaacaaaagattcaaaaccaaagcaagcaattaagaactaactttgatacccaaaagcttgatgataagatcaatgaattggagatcagaatgcaaaaactaaccaggaattttgaatctctaagtgaactttcaaagcacaactcttatcctaattactatgaaaaattgttaccaaatggtggtgatagtatgaccaatgtctttgaaaaagcactaatgatgaatttattgagaactacattaccccctcaaccccaagttcaatactaccctcaaccctatccatacataagaccttactatgatgaacctatttacgctgggtttagaagaaggggttaccgtgatgacttctatgaataaaaagcgtgttttaactaatgaaaccatttgataaaaaaccttcgctgcaaccaatttatgacattggttttgatgatggttatctccaaagtgagtatgaaaaaaatcgttctaaaaccgatgttgataagatcgaaaaccagcttttaaaagagattaaaagcctggaagatgaacttaaaaaccttaagggcttgaagaatcaagcagaagataatcctgaacttgataaaaagattaaccacttggaagttgatctaaaccgtttggttaatgaatataaaaacttccagttccaaaagaaccacatggttgataaggttagtgaacttgataacttaacccgtttttataagaatgaactaacccgcttacaacaagaaaacgctgattttctcaactccaagtatgctaatttagctaacttccaagctaactaccacaataaactaaatgattttcaccgcttaatagaaaatcaaaaccaaaccattaaccgcttaaaccaaaagattaatggtaaccaaaatctgattgataataacgttgctttactgcaaaaccccaacatcacagttgaaaaaaagaactacttactaaatgttattgatcaactttacaatgagcttgatcaacttgagaatcaaaaaagattattaagtattgagtatgaaaatacctatagagagttagttagtgcagataatgaactgcaaaatgtttatgaaaacatcgatcaaaatcagatccagtttaaacaccaataccaaacttatagagatgagttaagtcaacttgagcgcaagatccagctcaccaaacaagagttagttgataaagaatcagcactaagagtaaagatagatgatgctgatttttacattaatgcccgtttagctgaacttgatgatgtagctaaacaacttagctttcaagatggtattaccaagcaaaatgctcaacatgttgaggataagttagttgctttaaacaaagaaaaagaccgtttaaatacccaaaaagaggccttttttaacttaagacaatctgctttaattgatatcaataaactccagcaggaaaatgaactgtttgctaagcacttagaacaccagcaaaatgagtttgaacaaaaacagtctgatagcctcttaaagcttgaaactgaatataaggctttacaacacaagattaatgaatttaaaaatgaaagtgccactaagagcgaggaacttttaaaccaagaacgggaactatttgaaaaacgcagggaaattgacacgcttttaacccaagcatctttggaatatgaacaccaacgtgagtcaagtcaactactcaaagataagcagaatgaagtaaaacaacacttccaaaacttagagtatgctaaaaaggagctagacaaagaaagaaacctcttagatcaacaaaaaaaagttgatagtgaagcaatctttcaactcaaagaaaaggttgctcaagaacgtaaggagcttgaagaactataccttgttaaaaaacaaaaacaagatcagaaggaaaatgaactgttgttttttgaaaagcagttaaaacaacaccaagcagattttgaaaatgaattggaagctaaacaacaggagttgtttgaagctaaacatgcattggaacgttcctttatcaaacttgaagataaagaaaaagatcttaacactaaagcacaacagattgccaatgagttttcccaactaaaaactgataagtcaaagagtgctgattttgaactaatgttgcaaaatgagtatgaaaacttgcaacaagaaaaacaaaagttattccaagaacgtacttactttgaaaggaatgctgcggttttatcaaaccggttacaacaaaaacgtgaggagttattacaacaaaaagaaacgcttgatcagcttacaaaaagctttgagcaagaacggttaatcaaccaaagggaacacaaggagttggttgcatcagttgaaaaacaaaaggagatattgggcaaaaaactccaagatttttcccaaacttcactgaacgcttctaaaaatttagctgaacgggagatggcaatcaagtttaaagaaaaggagatagaagcaactgaaaagcaactgttaaatgatgttaataatgctgaagttatccaagcagacttagcacaactcaaccaatcacttaaccaagaacgcagtgaattgcaaaacgccaaacaaaggattgctgattttcacaatgattcactaaaaaaactcaatgagtatgaacttagcttacaaaaacggttgcaagaattacaaacccttgaggctaaccaaaaacaacattcatatcaaaatcaagcttactttgaaggtgaacttgataaacttaacagagaaaaacaagcttttttgaacttacgtaagaaacaaactatggaggttgatgctattaaacaaaggttgagtgataaacatcaagctttaaatatgcaacaagcagagctagatagaaaaacccatgagttaaataatgcttttttaaaccatgatgcggatcaaaagagtctacaggaccaactagcaactgttaaagagacccaaaaactaattgatttagaacgtagtgcactgcttgaaaagcaacgtgagtttgctgaaaatgttgctggttttaagcgccattggtctaataaaactagtcaactccaaaagatttatgaactgaccaaaaaacaggaaagtgagcaaacccaaaaggaaacagaactaaagattgcttttagtgatctacaaaaagactatcaggtttttgaactccaaaaggaccaagaatttagacaaattgaagctaagcaacgtgaacttgacaagttagctgaaaaaaataatcaggtcaaactagaacttgataacaggtttcaagcgctgcaaaaccaaaagcaagacacagtacaagctcagctagaactggaacgtgaacaacaccagttaaaccttgagcaaactgctttcaaccaagctaatgaatcacttttaaaacaacgtgaacaactcaccaaaaagatccaagctttccactatgagttgaaaaagcgtaaccaattcttagctttaaaagggaaaaggttgtttgcaaaagagcaagatcaacaacgcaaagatcaggagatcaactgacgctttaaacagtttgaaaaggaatatactgattttgatgaagctaagaaaagggaacttgaagagcttgaaaagatcagaagaagtttaagtcaaagcaacgttgaattagagagaaaaagagaaaaactggctactgatttcactaatttaaataaggttcaacacaacacccaaattaaccgtgatcaacttaacagtcagatcagacagttcttattagaacgcaaaaacttccaacgctttagtaatgaagctaatgctaaaaaagcctttttaattaagcgcttaagaagctttgcatccaatctaaaactccaaaaagaagcgttagcaatccaaaaactagagtttgataagcgtgatgaacaacagaaaaaagagttacagcaagctactttacaactagaacagttcaagtttgaaaagcaaaactttgacattgaaaaacaacgccaactagttgctattaaaactcagtgtgaaaaacttagtgatgaaaaaaaggcactaaaccaaaagctagttgaactaaaaaacttatcccaaacctatcttgctaataagaataaggctgaatactcccagcaacaactccaacagaaatacaccaatttacttgatctgaaggaaaacttagagagaaccaaagatcaattagataaaaaacatcgttctatcttcgctagattaactaagtttgcaaatgacttacgttttgaaaaaaagcaactgttaaaagcacagcgcatagttgatgataaaaaccgtcttttgaaagaaaatgaacgtaacctccatttcctttccaatgaaacagaacgaaaacgagcagttctcgaagatcaaatttcttactttgaaaaacaacgtaaacaagctactgatgcgatcctagcatcacataaagaagttaaaaagaaggaaggtgaactgcaaaagttactggttgaattagaaacaagaaaaaccaaactcaacaatgattttgcaaaattctcaagacaacgtgaagagtttgaaaaccaacgcttaaagctcttggaactgcaaaaaaccctgcaaacccaaactaattccaacaactttaaaaccaaagcaatccaagagattgaaaacagttataaaagggggatggaagaacttaacttccaaaagaaggagtttgataagaataaatcacgcttatatgaatactttagaaagatgcgtgatgagattgaaagaaaggaaagtcaggttaagttagttttaaaagagacccaaaggaaagccaacctcttagaagcacaagccaacaaacttaacattgaaaaaaacactattgactttaaagaaaaagagttaaaagcctttaaagataaggttgatcaagacattgattcaaccaataaacaacgcaaggagttaaatgagcttttaaatgaaaacaagttattacaacaatcactaatcgaaagagaaagggctattaattccaaagattcacttctaaataagaagatagaaacgattaaacgccaactccatgataaggagatgcgggtgttgcgcttggttgatagaatgaaattagcagaacagaaataccaaacagaaatcaaccgcttaagaacccaaactttcgattctgaaaaacaagacattaaaaacttcttcccaccgttatttaaaattaacggtaatgatatggcctttccttacttgtacccctgactatatcctcaacaaaagcaagatgataatactctgcaaattcgtcagctttttgaacagcagctgcagttcatgcaacaacgctatgaaaatgagttaaatgaattgcgtagacaacgtaatttacttgagaaaaaacttgatcaaatccaactagaatcccaacttaataataagcaaagtgagtttagtaaggtggaatcaatgatggaaaaactacttgaaaaaactgagagtaggttaaatgattttgatcagaaaattaactatctcaccaagaaagttaaccaacacaacacctatcaaccaagttcctatcaaccaactccttcttatcaagacagtgataaacaacagttgttatttagaatccaagaactggaaaaacaaaacttattccaacaacaatttcaacctgcaccagctgttgtccaacaacctactagttttgcagcccctaacatcaccaaacaacagcaaattgcccaacttaatgctgaaattaacaacattaaaaggttgattgcccaaaaagcagcaagtaaataaagatggttaataatgaatatcaacaactaaacactttagttgagagtgatgatgaagcggatcttgtgattgctaacctagttaaacaactcaatgaactaaagcaaatccttgtttcactagataatcaagaagcaagtgccactgcagttactgataaaaaggaagaggaatacaaccaaaaccaatccagtttccataacttcagcaaagaaacactgcaaaagcaagcaaaacgtggttttcttttactggaacgctgttcgttggttgggttacaacaactagagttggagtatgttaatttgttgggcagaagttttgattcttatcaacaaaaaacagagcttttaaacaacttaaaggagcttgttgatgaacatttcagtgatactgaaaaaattatcaatacccttgaaaagatctttgatgttattggcggtagtgaatatacccctgtcttaaactcgttttttaacaagcttttaagtgatcctgatccaatccaacgggaaattggcttaagacaatttatcatcactctccgtcagcgctttaaaaagttatcacaaaagattgacagttctctcaaacagatagaaacagaggctaaaatagccactgaacaggttcaaaatagtgaagtgatgttcggtccccctgatattgctaatgatcatgagttaaacctgaactgacctgatagtgaaacagatgctatcttaagttcaatggaaaatgaattggaagctgctttattagcaaaacaccaagaagaaccaccgttaattgttaccccacccagcttaataaaaccaactgttagtcaacctgaagttgaagttgttacacctactaacaacactaatttccaaccccaagttgatctcaaacctactgatttgaaaaaacaacagaagaaaaaaccacttaactttattacccgtcctgttttcaaaagtaatttgccaccgaaactaagtaaggatgacatagttcattatgcgcaccagttacttgaaaaaaatacccataatgaatagtgatagtgatctaaaactccaaaaggtgtggatcgagcggcatgttgatcaagatgaacttagtttaacaactactgcagttgaacttaaaaagagtgatgaacaaaaacctgttgccattaaaagtagtgactttattggtcatgaagagttaatctctgttccagttttactaatcccaacccctgttgttaaagagattgatcaaccagcagttattcctccagttaaagcaaaaccaaaagcaactaaaaagaaaactcctgttaaatcaaaaccaactagtaaatcaactaaacaaacaaaacctaaacaatccaagcccaaatcaaaacaagttcaacaaaccaaagctaaaccaacccaaattcaaacaaaaaaaagcaataaaaaaaccagatcttaatctggtttttttagtgttaacaacagtagttttaactaaaaactggaaaggaataggaagaactacctggggttaatcctagtttaaaccgtgcggtgttaaagtaattgcttttagagcgataactattatttttattctcattatcatcatcagaaccattggcattagctgtggtactttgaaaaatgtcatttactgcatgtgcaaccccagtaagtgcattaactatcataataagtcctgcactaaaagttcagaaagataatccaccaacaacttgcttagcttgtgctttttctaatttatacatataactccttttgtctattaatcacatctaaatctaaaagtgccaaagttttataattgatcaactgtcatcatagctcaataggacagagtatcagcttgcggagctgagggttacaggttcgattcctgttggtgacgccattaactttatttgcctatcagttaaataactggtaggcttttttattgttttgtagtttatcaagggttaatttaagttgtagtcatttcattttggacaaaaagaaatttttatgctaagataaaagtgtttaaaagtgtcgcaaagtgtgacaaagtggaaaaaatgctgctaggtacctttaatcttacccttgataacaagaacagaattagcttgccagctaagctccgtagtttctttgatagcagcatagttattaaccgcggctttgaaaactgtttggaaattagaaaacctgcagactttgagagttattttcaaacctttaataacttccctaacacccaaaaagacacaagaacattaaaacgcttaatctttgctaatgctaatctagttgaacttgatagtgcaaacagaatcctaatccctaataacctaattagtgatgctaagttagataaagagatcgtgttaattggtcaatttgaccatcttgaagtttgggataaagtgcaatatgaacaatatctagctagttcagaatcactagagacagtagctgaaaggatgaaagatgctaaataaccaacagatccaccagagtgtactgatcaatgaagtgatccataacctcaatattaacccttgtggtaactatttagatctaactgcagggtttgcaggacacagtcaaaagatcttagaaaaactaacaacaggaactttaacaattaatgatgttgataaagaaagtattaatttttgccaaaagcttttttttaaaaacaacaacgttgttattattcacgataactttgctaacttcccagttcatcttaaacaactatcaataaccaagtttgatgggatcttaatggaccttggtgtatcaagccatcaactcaaccaacctaatcgcggttttagttttaagaatgatggaccgattgacatgcgtatggaccaatccaatcagaaaaataccgcactaacagttttaaaaaacttaactgaacaaaagttaagtctaatccttaaaaagtatggtgatattaaacaccctaaaccaattgctattggattgaaaaaagcagttcaaactgaaaaaaatcttaccacaactcaactagcaaaagtggtaaaagaatgtgctactggatttgaaaaataccaatcaagaaactatcttgccaaagtttttcaagcaattaggatctatcttaatgatgagattactaatctgaaaactgcgttaacttttatccctaatcttttaaaaaacaacagcaggtttcttgtgattgtttttcactccattgaagaaaaaattgtaaggaatttcattgcaaaactaaccagctttatccaacctgaagctctacccattaaactcactcctgcttaccagttaattacaaaaaaaccaatcctaccttcccaaaaagaacttgaattaaacccgcgttcgcgtagtgccaaactctttgttatccaaaaaaactagtatgtacaaaccaaaaaatattaacagcgtattaaccttttataaggatcagatccaactggttgttagtgatgatcaaaaccagttcaacatcttgttttaccaaacaattgataacgatggcttttattcaaaacaacagttgaaaaacaaactaagactcaagttagcattaaaccaactagttgatcaagctaactattttcttggttttaaactggaaaaggtagttgttgttctcgctgaactgattgatgatttgaagatccataatttcaagagtgagatcttttttactggttatgattttgatcataaagcgatgattaaaaaagaaaaacaacgcttttgtgagcaaaataaccaactaacagttatggatacaatggttttaaactaccatgatgttattaacaataagatcaccaaaagctttgcatttaacaagagctatgtagctaatttagtggcatattcctctaaaagtaacctgatcggggagttgaagttctttttaaaaagaaacgttaatcttaaggttaagaaaattattagtcaccacttagcattagccaactccttaagtaagaaacaaaacaacatgtttgtttatttaggacaaaaaactactgaactgatgctatttatggacaatgctttagttgatgttattaccaaccagtttggtaaaaaccactttattgatattccagctaaccaggaaaacaaaccactgcttgagtttttagttgataacaccactaagattggtgattgttattcgcttggtatgacctatacagatggtgatagttacaaagagattaaggctttgactattggtgatttaatgcaaacagttagtgacaagatcaaaaccttaattgattttattaacagtggttctctaacttttttcaacaagtttaaaaccttacctaagctattgtatttttatacaagatcaaaacaaattaccaacctttttcaagctaatgttgcacttatcaatccccagtttaaaactgttgatatttataagaacaagatccagtttattagtgaaaactacctgttaagctgtgaagcgattagcttgcagattaccaatagaatcaaaaaccaaattagttttgatttcacaaatgctgataatattcaaaaacctaaaccaaaaaaacacttcatgatcttatcaaaacacctaacaaagtttgtccaacgcttggttaaataactatggatgaaaatgaaactcaattcaacaagttaaaccaagttaaaaacaagctgaaaattggtgtttttgggattggaggtgctggtaataacattgttgatgcatcactttatcactatcctaatttagcaagtgaaaacatccacttttatgctataaattcagatttacaacaccttgcatttaaaacgaatgttaaaaataaactcttaattcaagaccatactaacaagggctttggagcggggggtgatccagctaaaggagctagtttagcaataagctttcaagaacagtttaatacacttacagatgggtatgatttttgtatcttagttgctggatttggtaagggtactggtacaggtgctaccccagtttttagcaagatcttaaaaactaagaagatcttaaatgttgctattgttacctatccatctttaaacgagggattaacagtgagaaacaaagccactaaggggcttgaaattctcaacaaagcaactgatagttacatgctattttgtaatgaaaaatgtacaaatggtatctaccaactagcaaacacagagatagtcagtgccattaaaaacctaatagaactaattactattcctttgcagcaaaacattgattttgaagatgtacgtgccttttttcaaaccaaaaaaactaaccaagatcaacagctttttactgttactcacccctttagttttagctttgatagtaaagatagtatagaacagtttgctaaacagtttaagaactttgaaaaagttagttattttgaccactctatagtaggagctaaaaaagtgttattgaaagctaacattaaccaaaagatagtcaagcttaacttcaagcagatccaagatattatctgaactaaaattgacaactaccaacttgagattaggttaggggttgattttgtgacaaccatccctaatatccaaatttttatcctcagtgaacacaaaaatccagtttcgcttcccattgataataaatcaactgaaaacaaccaaaataagttgaaacttttagatgagctgaaagaacttggcatgaaatatgttaagcaccaaaaccaaatctactaattaatttaatttatcgtttagaattgctatcttaagcaatagtttatgggtcaaatcaatcggaagtttagcgaaaagcagttcttactttttgttgttaactatattgctggatttggctttattgctactgctatctcactgtttcgcttaggacctttttcttggttaatctttctgcttgttagcttagttagtttaattgttaccttatcattcgcacggctttcatcaatagatagtcaaaactatggtgggccttatctttgggctaagaaagcggttgataaagagaagatagcagggagaatgtttagcttttttacggggtgaaataactttatcattggtcctctttcagcagcaactgcaccactttttatcctcaattcctttagtggtattgatgggattagaggtaacttagttaacacttgaatcctaattgcaataggtttttctttttatgtattactagcatttatctcaaccaaaggaacctcactaaacaagaaactaatagcactatttgcttcagtaaagtggattgtgatcctctcagcactaatagtagcaatctatgttattgctagagatggtaatggttatagtcaaaacaataacttagaaagtggtttttttgggagaagagagattagttttgcacagatagcaacggtatttattaccttcttttattcttatgcaggggttgaagatatctcagtgatgactcctgatgttaaaactaataactttagaaagatattaattgtctcttttatagcagttttcctcttttatttcattgggattattattctaaatggtttgcaaaacattgctcaaagaggtggggaagccaattcaattggtaatgtagcggatatctttaaaaaagctgctgggcttgggactttaatcttttatggagttggagcattgtttaacaatgtctcaaccagactttcaactattattgccaactccagaaagattcttccgcttgcttatgataactatttacctagtttcttttacaagcaaaacaaaaaaggtgagtttcagaatgcaatttggtttacctttggtactactttaattgcaatgactttgcttgtctttatccctttagttgcttctaactttgattttgataatgctactgagtatgcagcatctgttggctcagctgcaactttgctacaatatatttttgttttttttataatctttaagtttatctataaaaaagaaccactctaccagaaaaaatgggttaaaacaactgaagaattattgttttgtttaggaacaattgtcattgttttaatgttgttggtttatctgtttcctgttatagatggattttcaaaatgggaaactaaacacacattaacaattgtgttatatggggttttaagcctgataggattggtactttttttgctccaagaatacaaacataaaaacaagcaaaatgcaaacaaacaaacaacccaaacaacagtttagtgaaaagcaattcattgcttttgtctttaactatattgctggatttggctttatatcagtggtgatgaccatgtttgatgttgggccattttcctatcttgttttagggttaacttcgtttgctattttaggagttgtgctttctttttctcgcctttcagttctctgtggtaatagtgcttatggagggagttatttaattgctaaaaaagcagttggtactaacagtaaaacaaaaaggttttttgtttttttaagtgggtggaatgtatcgttaacaggatcttttaacggtgttgttattccagcagtattaatcttttcctttgcagatattccagtagttaaagcgaataataacatcattattggccttttagtaggtgggtttttgttgtttggcttacttacttttatctcgttatttggtttaaaaattaacaagaaagcaatcttttattttgctgttattaagtggatagtagtaataggtgggtttatcttagggatctatttaattggtactaccaatggtaaaggttttgttgaaaacaatttaattgggactagggaaaacattgattttttcaagattatctttattagtctggctttaaccattgcttttgcagggacagaggatttagcttcgattactcctgatgtcaagtcaaataacttaagaaagtgttttttaattgcctttgggtgtgttgtgttactttacctagttgggtttgttattatcagtggacttgatgggattagaggttatggattagcattaggtaataaagatcccaaggcaattaataactatggatctatctaccgtttggtaggaggagttcctttacttgttatctatggacttgggttacttgtcaattccttagcatcacgcctatcaatgacaattacaacagctagaaaatatgtagctttagctcaagatgggtttttaccctcttttttagcaaaaactaataaacataatgagtatcatcatgcagttttaattagtaatctaatgactttattagtgatgctaattatggtaataatcccctttttaccagaccataacaacaataacaatagtttgtttaatgctattgaacagttggttacagttaccattgaaatggctgcagccatttctttgatccaatactttattacctttatcttcttttttatgatctttgctaaaaaggaaaaccagaagttaattcccttgtgagaaaaggttagttatgtaattagctttgctttggtaagtgtgttgttgtttgtaccacttttcccttttaatcagtgaacagtgtttaacacctttaagatagttgttctaatttgtttttatctacttggtgttggtttttttggttatgctgaatggaaaaataaaaacaaataccaattaatgaataacaatagctaatctacagttcattaagcgaaattgcttttgaatcggcaacaacaaacccttctccaactccccctccccttcaacttccgcttcctcttctacccccctccccactttttctaacatcaatgttggggttaaatcaatgatcactcaacatttaaataaagaaaacacccggtgggtgtttatacctaacttttcacctgacatctgaacaggagcagggtatcgcaaacaaggtaacaataatggcatctccttgaccaggtgaaacctagtagtagtagcaacacgtttaatcccaattcttctgataataaagtcactcaaggtggtggctccccagccaaaaaaacaaccacctatcctgctttaccaaactccatcagtcccaccagtgactgttaaaatgtttattaaaaaaacaaaataaaaagcggttttatacaatgtataacctgtctaaaagacaatttcatgaaacagtatttagatttagctagttatgttttagcaaatggtaaaaaaagaaaaaaccgtacagatacagatactttaagtgtctttggttaccagatgaaatttgaccttactaatagttttcctttattgacaactaaaaaggttaattggaaggcaattgtccatgaattgttgtgatttattaagggtgataccaacattaagtacttagttgataatggggtgaacatctgaaatgaatgaccatatgaaaactttaaaaaatcaccaagttttcaaaacgaaacactccaagaatttatcttaaaggttaaaactgataatgagtttgctaaacaatttgctgatttgggtcctgtttatggcaagcaatgacgtaattttaatggtgttgatcaactcaaaaaagtcatccaagagattaaagaaaatcccaactcaagaaggctaattgtctcaagctgaaaccctagtgaattggaaaaaatggcattggctccttgtcattcactctttcagttctatgttgaagaagataaactaagcttacagctttaccagcgcagcggtgatatctttcttggtgtcccatttaacattgcatcttacgccttacttgtgtatttagttgctcatgaaactaagttaaaacctggttattttatccatacactaggagatgcacatatctatgaaaaccacattgaacaaattaaattacaactaacaagaacaaccctagacccccctcaagtggttttgaaaagtgataaatcaatctttgcttatagttttgatgatattgagttagttggttataattaccatccatttatctatgggagggttgcagtttaatgctaattgctatctgagcgatgacacaagaaggactaataggtaataacaacactttaccttggatgattaaacaagagctagctcactttaaaaaaactacgttatttcaagctttgttaatggggagaaaaacttacgaatcactccccaaggtatttgaaaaaagaacaatatttctcctttcaaaagatcaaaactaccgttttgaagaaaagggaagtgaagtgaaagttattaatgatttttgaccactaattaaaagttaccaagcaaataaagaaaaggatttgtttatttgtggtggaaaaagtgtgtatgaacagaccattaatgaatgtgatcagttaattgtttcaatcattaaaaagaagtataagggtgatcagtttttgaaggttgatctcagtaaatttgtacttaatgaagttgtagagtttgaggaatttaatgttaattattatagaaagaaacaacaataagagatatggcagctaacaataaaaagtactttttagaatcattttccccacttgggtatgtaaagaataattttcagggcaacttacgttctgtaaactggaatttggttgatgatgagaaggatttggaagtgtgaaacaggattgttcagaacttttggttacctgaaaagatccctgtatccaatgacatcccctcatgaaagaaactctcaaaggattgacaggatctgatcactaagacctttactggtttaacactacttgatactatccaagctaccattggtgacatctgtcaaattgatcatgctctaactgatcatgagcaggttatttatgcaaactttgcttttatggtaggggtacatgcccgttcctatggaacgatcttctcaactttatgtacatcagaacagattaacgctgctcatgagtgggttgtaaacactgaaagtctccagaaaagagcaaaggcattaatcccttactatacgggcaatgacccgttaaaatcaaaggtagcagcagctttaatgcctgggtttttactgtatggtgggttttatttgcctttttacttgtcatcaagaaaacaactaccaaatacatctgatattatccgcttaatccttcgtgataaagtgatccataactattacagtggttataaataccaacgtaaactagaaaaactccctttagcaaaacaaaaggagatgaaagcatttgtttttgaactaatgtatcggttaattgaacttgaaaaggactatttaaaagagctttatgaagggtttggaattgttgatgatgccattaagttcagtgtttacaatgctggtaagtttttacagaacttaggttatgactccccgtttactgcagcagaaaccaggattaaaccagagatttttgcccaactatcagcacgtgctgatgaaaaccatgactttttctcaggaaacggttcgtcgtatgtgatgggagttagtgaagagacaaatgatgatgattggaacttttaagttatgcataaagatatcaaactagttaaggaaactgaaattagaaaaccaattggttctccttttattgtctatttttcatctatctccaacaacacccaccgttttattgaaaaactgggttttcaacacaaaagaatcccagttgatataacccaaagcattactgtaagtaatgagtatgttttaatctgtccaacttatagtggtgggggtaaccaggttgaaggagcggtacccaagcaagttatccagtttttaaataacaagcataacagggagttatgcagaggagttattgcatctggtaacactaattttggagatactttttgtcttgcaggaactgttatttccaaaaaactaaacgtccctttgttgtatcagtttgaacttttgggaacaaaaaatgatgtagaacaaacccaaaaaataattgccaatttctttcaaaacagcaactagtatttatagttatccactatgacatccaaagaaaaaatccctacttttaatactgaagaagatgttgaaagttacatttcttttaatgcccaagccaaaatctatgatgattttgcaatcgatttacaagcagttgaaagctatattcaagagcatgtaaaacccaaaactaaggtctttcattccaccaaagaacgccttgattttctgattaagaacgattattatgatgagaagatcatcaacatgtacagttttgaacagtttgaagagatcacccataaagcatattcataccgctttcgttatgctaacttcatgggagcatttaagttctataatgcctatgctttaaagacatttgatggtaagtactacttggaaaactatgaggatagggtggtgatgaatgtattgatgttagctaatggtaacttcaataaggcattaaaactcttaaaacagattatccttaaccgttttcaaccagcaacccctacctttcttaatgctggtagaaagaaacgtggtgaatttgtttcatgttacctgttaaggattgaagataacatggaatcaataggtagagcgataacaactacactacaactatcaaaacgtgatgggggagtagcacttttgctttccaacttacgtgaagcgggagcgcccatcaaaaagatagaaaaccaatcatcagggattatcccaattatgaaattgttagaggactctttttcctattccaaccaacttggacaaagacaaggagcgggagcggtgtatctccattgtcaccatcctgatgttatgcagtttttagatactaaaagggaaaatgctgatgagaagatcagaattaaatcactctccttaggacttgtgattccagatatcaccttccaattagcaaaaaataacgagatgatggcacttttcagtccatatgatatctatcaggagtatggtaaggctttatctgatatctcagtaactgagatgtattatgaattgcttgaaaaccaacgcattaaaaagacctttattagtgctagaaagttctttcaaacaattgctgaactccactttgaaagtggttatccctacatcttgtttgatgatacagttaacaggagaaatgcccacaaaaacaggatagtaatgtctaacctttgcagtgaaattgtccaaccatctttaccttctgaattctattcagaccttacttttaaaaaggtaggtagtgatattagctgtaacttggggagtttaaatattgctagagcaatggaaagtggtagtgagttagctgaattgattcaactagcaattgaatcactggatttagtgtcaaggatcagtagtttagaaaccgctccttccattaaaaaaggtaattcagaaaaccatgcgttgggattaggagcgatgaacttacatggatttttagcaacaaatgctatctattatgattcaaaggaagcggttgattttactaacatctttttttatacagtagcataccatgcgtttagtgcttccaataaattagcattggaactaggtaaatttaaagactttgaaaatactaaatttgctgatggtagttactttgataagtacactaaggtagctagtgacttttgaacatgtaaaacagaaaaagttcaagccctttttgataaataccaagtaaaaattccaactcaggaaaattggaagcaattggtagcaagtatccaaaaagatggacttgcaaactcccatttaatggctattgccccaactggatctatctcatatctctcttcatgtaccccttcacttcaaccagtagtatctcctgttgaagtgagaaaagaagggaagttaggacggatttatgtccctgcttataagcttgataatgataactatcagtactttaaagatggtgcttatgaactgggctttgaacctattattaacatagtagcagcagcccaacaacatgttgatcaagcaatctctttaaccttgtttatgactgataaagctaccaccagagatctcaataaagcttatatttatgcttttaaaaagggttgtagttctatctattatgtcagagtaagacaagatgttttaaaagatagtgaagatcacactattaaaatcaaggattgtgaggtttgttctatctaactattaaagcagttagaatttgttagaattacttgttttaaaactatcttaatccctaatatataaattagaaaggcaacggttttgagaagatgcatgctattgtggtttgtggtgctaagcagtatttagtccatgaaaacgagtctatttttgttgaaaaattagctggtaaagttggtcaggagatccaacttgataaggtattgatgcttgatgaaaagataggcaaaccttaccttgaaaaagctaaggttgtttgtgtgattgaaaaacacggtttaaaatcgaaaattaaactaattaaacacatctcccaaaaacaccacctcaagcgttatggccaccgtcaaccctacaccaaactaaaagtggtacgctttatccatgattaagattaatatctcccaaaactttctagttgcaaaaggtcatgctttgtttgctgagaagggtaaggacatagtttgtgctgcaattagtggaattatctttgggggggtggcttggtttgaacctgataagattgaatttactgaaaataaattagtacctagtatagcactgaaactcattgacccaacccctaatgtagcagttgcttttagtgttattacagtacaattaaaagcaatagccaattcctatcctaatcacatagttatcaatgaagagagttatgagtaaaaacagttactgctaccaaattaacttacagtttttcgcttccaaaaaaggggttggttccactaagaatggacgtgattcacattctaagcgcttgggcgctaagaaggcagatggtcagatgattagagttggtcagattatctatagacaaaggggaactaagatctttgcaggacaaaatgttgcaatgggtagtgataacaccctctttgctttgagcgatggcattgtccgctttcaaaagtttggtagtaaacaaagcaaaacccgggttaacatcatcaaacaccaactaaatgcctaagctactgggtagctttattagctttaaagcccccaattactttgttcaaagtgctcaggatgcaattgctattgatgcaactgctctaatggtatttttaggtccaccccattctgcttaccgtgttccttttaacaagatgcagtttagtttgggctatgagttgttaaaaacaaagaatattaatagtaatggtttggttgttcatgctccatatatcattaactgtgcatcaaaagacccactaaaacagcagaatgctatcagtgttttaaccaatgagattcagctttgtaacttggctggtgctcactatttagttttgcatccaggttctgcagtagcccaaacaaccaacgaagcattagataacctggttaaagtactcaatcaagttatcaataaaaccaaaacaacagttatttgccttgaaacaatggctggtaagggtaatgagataggcagagacttaactgagttgaaatatgttattgacaggatcgttgataaagataggatcggggtttgtcttgatacctgtcacttccatgatagtgggattgactttagtgatctaactggtgtttttaacaccattacaactaaacttggttttgagtttctcaaagtaatccatttaaatgaatctaaaaataattgtggttctaaaaaagataggcatgctaatatcaatgctgggatgattggttttgagaacttaatgaagttcattagtcacccccaaattaaggatttacctattatcttagaaaccccttcaactagtttaaactacccaactatttaccgtgaagagattagtcaaatccgcagctgatttaaaacttaccaaccagatgctaactagttatgtgaaggtattagaacaaaacaatctgcgcttaacaaaaccgcggattgctttattaaagtgtttaattgaacaccaagattggcataatctctcccaaattaaaacccaccttgatttagccaatcaaccctcaacactcgcttctatctacaacaacttaagaatcctagctaaacttaaactgattaacatctttgtagatccagagcggtttgaaacttactattgcctgcgccatgcagagcataaccatatctatctttttgatgaagttaaacagcagttttttaccttacctttaacagatggccaaattaaaacattgcttgaaacccaaaaccataccagtaaggtaaagcttaatgatttttatattgttgctaggggtgagataaacaatgattaacaaaccaaaccaatttttaaaccaccttgatggcttaaagcaacatttttctgattatgattcactacaaaaatcctttaagaaatatctatcagaaaatcaaactgaacttaacaatttcttttttaaccagtttgaaaagatcattgttctggtcaaaaaaaaggagtttaaaactgctcaagagaggtgtgaagaggagttagctaccccttatttttcaaagccattggttggttttttccaatcactattacaactaattaaccatgatctcatcgaacagaaaaaccaacagttagctaacatgagttgtgaaaaaattgtggagatggtgttaagtgattaccccaataaacttaacttaatccactatttgttagcaaaagaagcgagttttgtaaaccctaaccttttacagcggatgacttttgtgttaactgatcttgaactgttagagttaaagcgtttctctttttttaaagcccttaaccagatacctgcttttaaaaaccacaaagtaacatactttaacagcaaactcaaacagaagtttgtaataacattaggtgaatttgctttcccccaaactgataaaaccaaacagtttttccaacaactaattaaaaaagtaagtcaactgtttttaaaagaacctgttagttgtgaatttgcttatgaaattattgatgcattactcgtcagtttttttccactccatcctaatttagaagtaaaccacttagctaaaaagatccaccagtatgttagtaagattgtcattaatgaagttgttgatctgaaagatccaaccactaaactaattgttgatacactttatgaacagttagatagagcaattggtgaggaaaattaaaattaagttagcactagtagatacaaaagatgaagttatacaaagttcttaacagtaaaacaactgataaaagtctttgtttggaagttgagattgatccaaattactgacaagctacccaaaaaaaactagtaggtgaaatggctaaatcgataaaaattaagggttttcgtcccggtaaaatcccccctaatttagccagtcagtcgattaataaagctgaattaatgcaaaaaagtgcccaaaacgtcatgaacagtatttatgaatcagttcaacaagaagagatcgttgctagtaatgataatgtcattgatgattatcctaccattgatttcaaaacgatcactgaacaaaactgtgtacttttgttttactttgatctgatccctaactttcaactccctgattacaaaaagataaaagatttaacaccacttaccaagttaactgaagctgaatttaacaacgaaattgaaaagctggcaaaaactaaaagcacaatggtagatgttagtgataaaaaactagctaatggtgatattgctatcattgatttcactgggatagttgataacaaaaaactagcatcagcttcagcacaaaactatgaattgacaattggttcaaatagctttattaagggttttgaaaccgggttaatagcaatgaaagttaaccagaaaaaaactttagcactaacttttcctagtgattatcatgttaaggagttgcaatcaaaaccagttacatttgaagtagttttaaaagcaattaaaaaactggaattcaccccaatggatgaaactaatttcaaatcctttctccctgaacaattccaaagctttacttctctaaaggcatttaagagttattttcataagctaatggaaaacaaaaaacaagagacaattctccaggagaataaccaaaaaattcgtcagttcttacttactaataccaaacttccttttcttccagaagcgttaattaaactagaagctaaccgcttgttaaagctccagcaaagccaagctgaacaatataaaatcccctttgaaaaactcttaagtgcttctaatatcaccctaacagagttacaagatcgcaacataaaagaagctaaggaaaatgttacctttgctttggtaatgaaaaagatagctgacattgaaaagattaaggttgataataacaagattaaagctgaaattgaaaatgttattgctgttgaatatccctttgctagtgatgaaatgaaaaaacaactcttttttaatatggaacaacaaaaggagtttgtggaatcaattatcatcaacagattaacaacaactaaaatcgttagctattcaactcattagcactcaaagcttgtgagtgctaagaaatgtgttaaaatttattgaaattccctaattaacttttaaatatgcccgttacgaagaaaagtcagatcttagtagttagaggtcaagtcatttttccttttgttccctttagtttggatgttggcaggccccgttcgcgtaagatcatcaaagcgcttaaaactctgaaaaccaaacgtttggttttagtaacccaaaagtttactggtgaacaaaaccctgagtttaatgacatctatcatgtcggtacactctgtgagattgatgagatagttgatgttccaggggttgatagtaaaacagtagactaccgtattaaaggcagaggtttacaacgggttttaattgaaaaattctcagatgcagatattaatgaagttagttaccaattacttaactccacagttaaagatgaagctaatgttgacaggttcttacagcgaatctttcctgaaaaagaagaaattgaacagttaatggaaggagctgagaagtttttagaacttgaaaacatcagcaaaacagttaatgttcctaagggtttaaagcaacttgatattatcacctttaaactggctaatcttgtccctaacactgaaagtattaaacaagctatcttagaggaaaatgagatagcaaaccgattggaaaagattatccaagcagggattgaagatttacagaagatccaagattatggtagatctaaaaacaaggaaactgagtttgataaacttgacagtaaaattacccgcaaaattaacgaacaactctcaagacaacaacgtgatttctatcttcgtgaaaagctaagaattatccgtgaagagatagggattagttccaaaaaagaggatgaagttgctagtattagaaagaaactggatgaaaacccttaccctgaagccattaaaaaacggattttaagtgaacttgaacactatgaaaactcttcctcctcttcccaagaatcaaccttaaccaaaacttacattgatacgcttttaaacctgccttgatgacaaaagagcaaagataacagtgatgttaaaaacttaattaagacgttagataaaaaccacactggtttagataaggttaaagaaaggattgttgagtatttagcagtacaactaagaacccaaaaaaacaaaggtcctattatgtgtttagtaggtcctcctggggttggtaaatcaagtctagctaagtctattgcagaagcattagataagaagtttgtcaagatctcattagggggagtacatgatgaatcggaaatcagaggtcaccgtaaaacttacttaggttctatgccaggaaggattttgaaagggatgacccgtgctaaggtaattaatcccctctttttacttgatgaaattgataagatgacctcctccaaccaaggttatccttcaggtgctttacttgaagtattagatccagagttaaataataagtttagtgataactatgttgaagaagattatgatctttctaaagtaatgtttatcgctactgcaaactacatagaagatatccctgaagctttacttgataggatggagataattgaactcacttcctatacagaacaagagaagattgagatagcaaaaaaccacttaattaagcgttgccttgaggatgctgatcttaacagtgaagaattgaagttcactgatgaagcaatcagctacatcattaagttttacacaagagaagcgggggttagacaattagaacgattaatccaacaagttgtaagaaagtacatagtagcaatgcaaaaagatggcatcaaacaagaaacgattgatgtaaacgctgttaaaaaataccttaagaaggagatctttgatcacactatgcgtgatgaagtgtctctacctggaattgtcaacgggatggcatacaccccaactggaggggacttacttcccatagaagttacccatgttgctggtaaaggagagttgatcttaactggtaatttaaagcaaacaatgcgagaaagcgctaatgttgctttaggctatgtaaaagctaatgcagagcgttttaacattaatcctagtttgtttaaaaagattgatattaacatccatgttccaggtgggggaattcctaaggatggacctagtgctggtgctgctttggtaactgcaatcatctcatcattaactggtaagaaagtagatcctacagtggctatgacaggagagatcactttaagaggcaaagtgttggttattggtggggtgaaagaaaaaactatctcagcttaccgcggtggggttacaactatctttatgcctgagaaaaacgagcgctatttagatgaagtacccaaagagatagtagataaacttaacattatctttgttaaggaatacagtgatatctacaacaagcttttcagttagtctttaactaggttttggacatattttaaggtaattaaataggcctgttttaagttgcttttagctagttttactagttgatcaatctcaattcccccactccactgttcctgtttacggttaggttctagtttatctgctaaataaacaatcatatctagcttgctaacttgttttggtgggatggtgtggtttttgatggcattaataatcattttatctttaacaccaaatcagttttttaagatataagcccccacatagctatgtaatacttttcaacttgggtagttagttatcttcagttcactagttgcaatgttaactaactgatcaactggtagttgtttggccaagtcatgataagccccagcaacaaatgctcttttagcatctagtttgtttgcaattgctagttgttttgctagtttaccaacccttaaacagtgttgaaacctcttatcatcaaccattgcttttaaagtgggaattagatagaggtgattggtattgatgtaatttaaaactgccagtggtatcagtttttttctaggttgatttaaaagtttacttgaagcgatttcaagtgggcatttagccaagtatttaacattaaattggtttgctatttttttattaaaaggataaggttttcgttcataacaaacaaacgtgcacaaatcttttaactgttggatgtgatctcacttctcaagttcatttaatttatcactccctattaaaaaatagatttcactagttggataacaacttttaaagtggttaacagtattaattgaaaaagcgtttttagttttaatatcaaaattggaaactaaagcattgttgactgatttaattgctagctttaacatagcaatcctatccttattactagcatgaaaattatttttaaaaataccattgtaagttggtacaaaaaaaagcttttgcgcttttatttttttaattgcatgtttagcaatgtagagatgggcattgtgaatagggtcaaaagaaccaccaaagataataattttttgcttcaaaaaagatcttaaaacatttaattctaactaaaataattgtgacacaagagcaatgatccaaaaggagatggagatctataacctctttacttttcaaattgatcttgataaaaaactgttgtttgaaaaatcaaatgatcagaagaattattccaagattagaacccattatttcaagcataaattcaaaaataaaagtgctgtttttctcaataaaaacctgattaaaaatagcttaaataaggttcttttaaacttttctgattttgttagtggtgctggaattgatacagtttttaaccaaatcattgatgaagatcctgaggttttaaactatttaaagcaagttaaaaaagatctttccaaagaaaacaacgctacatcccaactaacctttaatgtaactattaaccctaaaaacaccctcgccaatttttttgaaggatttaatatttatctccattttaatgaagaaaacaatacagtgataggtagtttctcactacaatgacacatcaaaaaaactgatctgttttctgaaacaaaaaacattgccattaacaatttaattcacactttttgtaagaacaacatgcatgaaattagttttatgcagatcattaattgtttttccaaaacaaaaattaataaacatggtgaaattgttttaaaaagttgtgcttttaaacaaaaatgacaaaatgttgttgctgaaaaatacccattctcaactgcatctaaagatttggagaaaattaatgatttttttgatgctctttttgtaatgctattattggtatgtcacctcaataaaaacctgttatgattatgtgaaaaaactgatttttttgaatgaaaaccaagtcagaaaactgcactttttaaagctaatgatagtggagcatacttagctagaatgctgctctttttaaacgattggtacaacgaaaatcaagcaataacaactgctgacattgaaaatgttaatgaggttgaagacataggaaaattagttgaaaaatacagcactaatcaaccccaaaagttatcgttaaattcaacagtttatgtattacaaacaaaacaaaaacagttttttttaaaaaatgatttcttttttaataataacgaagcaaagctgttttttctaataactatgaagcccaatgtttttggtcttgatgatacagcaatagcaaataacttaaaccttaaaaaaattagtgatttttttaaagagattgattttaatgatgaggatattctaaatgactttaaacaagaacaggaaaagttattggttagaagaacatttaaccaactgttatttatgaacaaaaatactgaaattctcagtgttgtcaatgacaagcaaaagtcagtaatccataacattgtttgaaccattacttatagtaaagcgatcatgttaaaagcctttgattattccaaagcctttgaaaaaaaccgaacgagtgatccttccttattgcgatctaatttaactgttatcaaccgcttaagatacctcagtgaatactttcaaaatgcctcacttaagtatgatctactctacactaaggccaaacaatatatgcaaattgataaatttatcaacgacatgattcgcaaggtaaaccatgaggatgaaatctttggcaaatttaaagaaagaatttatttaagtttgggaattattagtgcggtagtgtttggcatagttgaattttttaactgtgtatggactatcttaactgttagtcaagaagtggttgataaaagtgttttggatccaaggaatattatctttattagtataggtactattttggttttatttcttttggttactatcttggtttttatgacaagaagactttatctgtttgaaattaataaaaagcataaaaattaggaatcatgaaattcaataagttaaacctaagtcattgtatctctttttacatctcagaagtttcagaagttttctttgaaagtatcaaccaacaccctagtcgtgattttgttaataacattcttcaaaagattaaaactactttaagtgaagaagagcttgaaaagttaaacagtattgaagaagttactaaggatgagaagattgtgatcatgctcaaccatgttttgaaaaagattgtttctaaaactggtagttctaagtgtgacttatttaatgtaatcaaacaagataggtttaattctccagtgtatatccaaagtattaatgcttttgaaaacaaccttattaacaatgaatttgctgaaagaaggtatgactatttgattgaagttaataaaaattcataccttaaaaaatttgtcaattcgatcagaatttccttcttcttagatttaagagcacaaattttgtcaggttcatttacccttaatttagttaataagtcaattgaaaaacaaaaaaagacagaaatttttaaagatatttttgttaatgccttagttaagcattttatctgtaatcaactttatcctatctctttaaattcctttatttttgacagtgaaaatcctagcaataaactcgctctaaaagaacggattaagcttttaaaaacaaactgaaattccctcttttttgataagttttacaactgtttaaacaataaaaataagcagcaacttcaagaaactagtgatgagatgttttatgcagtgattaacacttatttaatcatgttaatctctgttgaagagttaagggtttactttacaagtaaagaaccagcactgattttaaaggtattagataaaaaaaacacactaagagaagatcctgatcaaaaccctgaaactgatttgtatgaactaatacagtttatagaacaaaactacttaaaaaaagataaaaaaaccagctgaaataaaaaaaaggtacaggatcttgaacagttacttgaagagattaacaagattaatttagaaacaaaaaatgaatctttagcttaccctgatgagataacagaattggaaattgataatgataattttgtctctacaaaacaagtatttagaaaccaattagaattacaacttttgcatgggattgtaattaatcctgagaagtatggaattggcatgtgaagtagttattttgctgattgaagtgagtacaaaaatttaatagaacagatgctcaatcccaaaagtggtaatgatttttatcagtttgaaaaggacatagatgaaagcatatgtcaaattaacaaaaaatatctaacttttattagcagtgatagtaatacctttttaatagttaaaaatgatgatgtaaaagttatttctaactatgtatgagcacaacttttctttgaaacaagaaggtgaattatcaatgacattgaatttgacttgtatgaaaaaggatttgataaaagccacttttcacgtaacattgctttacttgaaagtctcagttttagttgattagatcctttttatggtttgacatcaattaaagagatcatgcagaaaatagatagtaaaagtaatcttaaaacctcgattgaagagatggtaaataggtttaaacatgagcagcgaattaataaaaaggacaatgaaagggtgttgatgatttttgcttatattgctgcttttgtagtaggatttatcaattttttctcaatggtctttactattctcactgtaagtgatctaaatgctgggcttactgtacctaacatcattgtaatcagtatcgctagtgttttagcttttattttgattgtgattgctgttttatttcgttttaaatgaaaacacattaagcactaataatgcaaattaaagttattaatgaaacaaataaaactgttcaaatttttcaatgtgctaaagtaaaacatagggcattagcttgattgtgcgatgtatttttattagctattgtacttgtggttatctttttaattactcaagcctttagtgataaccgttttcttttatttttagttttaagttgttcacaaacaatcctgtgaacggtttatttcatttttttaccatttttttgggatggtaaaactttgtttcgcaaccttttgaagattaagctatttgcttttgacaaaaggtttttgagaataatgatccatgagttgtttttatggatttgctttcagttttgtttttagtgattgctagttatttttttattaaccaaaatagcagcgaagcgcttaattttttcactaatttagataagcctaatgcaatagcgataacaattagaaccataacaattttgattagttttttacaactgatttttattggttatttttgttttagttctgaaaaacaagctttacaagagatactgtcaaacacctttatggttcaagaaaaacacactttaaaatcaaaaccaactagcttaaaaaccaacaatcaacctgatccagctaatttaccaggcgtaatagctcttgatgaagtggaaaaactcattaattaataacaatgaatgaacaacaaaaacaagcaattagttgtggaaaaggggttaatgttgtttattctggagcaggtactggtaaaacaacaattattactaatcgctttgcatacttggttaataaagaaaaagttgatcctagcagaattttagcaatcacctttactaagaaagctgctaaggagatgcagtttagaatcttgaaactaatagatagttctttagctgagaaaacaaatatctatacatttcacagcttttgcaataagtttttaattcaaacattaaaaaagcgctttatcatcgatgatgatattagctatttcctaaaggaatttttagctgattcaaaactcgatatcaacctagcgaaacaaattattgataactttaaaaatacttttgctgattttgaaataaataagttggatcaagatgaaaggttaattagtttatgtgagcattcacttctaaataaagatgaagaatattccactttaaaaacccaactgattaatgcattcattagctatgaaaagaataagatattaaacaataaacttgattttcatgatcttttaattaaaacttgtaatttattgagtaatgataatgatttacttaatcagtggagtgaacagtttcagcatattttagttgatgaatttcaagataccaaccaaatccaatatgaactgatcaagatgttagtaactaaaaataaaaacttgtttttggtaggtgataataaccagatgatttaccgctgaagaggggcggtaaacgggatcataactgctttaaagcatgactttaatgttccgaaaagcaatgaattctttattaatcaaaattaccgttgcgatcagaatattttagcagttgctaaccaaattcttttaaaaattatggcctatgaaaaacaagttaaaactgaaaaaaatctcttgttttcaactttaaattctgataaaaaacctgtttattttcaagctgaatcagttgaaaatcaagccaattggatcttcaataaaatcaaagcactaaaccaaacagaaaagattaattttaaggatatggccatcttgtttagaaagaacagagatattactactatggttgaattgattgaagcggatggaacaattcccttacctaaacaaaagagttattttaaccaactagtaaaactccagcgggttttaattgcgatttcaaccagaacaaatcttgatattaaaagagctttgcaagccctaaaaatttgatcaaatgatttaaaggaattgtgaaaacagagtgataaaacaaacctatttgattttcttaaatgatcagaattaaatcaaaaaaaccatagttcaaaacttaaagctactggttattttaatctgctgattaagttagcagaggatcagcaaattaaccttttgtttactgaactgtttaaaaaactcaaagtggatcaaactattgaaaatctgctttgaaaaaaactaactgaatttcaaaaagataaaactgaatttagcttatcagagtttattactagcttagcattggaatttgactcaattattgaaaacagcagtgatacaatcaatttgctaaccgttcatgcagcaaaaggacttgagtttgaagctgtatttatttatggcatgaatcaaggggattttcccttatttttaagtcaaaatcaaaatgacgaacaacatttaattgatgaattaaaactgttttatgttgctatcacaagagcaaaacgttttttgtttatcactgcggttttacaaataaataacaattctataaaaccatctagttttttaaattacatcaataaaagtgagtatttagacattgctactattaactatgtattagagcaggatgatgatttttttgattcaactaaaaaaacagactatacaaagaaactaagaaaagaaagtttagacattatagtgggtgatttagttactagtagatactttggaaaaggagttgtagttgaagtgagagacaaagaggttttagtagcttttaaagacacacgctatgggatgaaatggatcttaaaaaaccataaatcactaacaaaagctttatattaacaatggttgataaaaacagtttaagaaaattaatgcttctaaaaagagcagaactaaatgatcttgaaaaatcgcatttagatcaaaagattaaccaaaaattaatggcttttttaataacaagaccaacaattaaaaatttagcactttacattcccattaaaaacgaagtggcttttttagataactttctagattttcttaagttaaataaaattacaagctgttttcctagtattgttgatcaatttaacatgaagtttattgatcaaaataataatgaaattaaccctaatgatattgattgtttttttatccctttattagcttttaataaggcaaaccacaggattggttttggtaagggttattatgaccgttatttatcattaactagcaaaaaacaactaaaaatagggatagcatatgactttcaatatgcagaattcactaatgatccttgggattatcaattagatttaattatttgcaatggataacataaaggttctttttttaggtgatgtttatggcaaagctggtagaaagattattagtgatcatcttcccataattaaaaaaaagtatcagttaaatctaattattgcaaatgctgaaaacactactaatggtaagggtttaagttgaaaccactaccaaatactaaaacaagcaggaattgattacatcactatgggtaaccatacctggtttcaaaagcaagatttagaacttgttttaaaccaagttgatgttattcgcccacttaacttaatgcaagattttaactattttcagcttggcaaagggagttatttatttagcttaaatggtttgaaaataaggattactaacttgttaggaacaagtattaacttaccatttgcaataacaaacccatttgtggaattaaaaaagttagttttaactaaagattgtgatcttcatatcgttgattttcatgctgaaacaactagcgaaaaaaatgctttttgcatggtttttgatggttatgttactgctatcttaggaacccacacccatgttcctagtaatgatttaagaatcactcctaaaggaagtgtttacattactgatgtagggatgtgtggtcctggatttggtagtgttattggtgctaatcccaagcaatcaattaagttattttgtacaggtgaaagacagttttttgaggtttctaattgtggtgcacaactcaatggcgtcttctttgaagtttgttcaaaaaccaatcaagttgtgaaaatagaacagattagaatagttttagatgatgaaaagtatttagctaatgactactttaatttagttgagtaatcttgctttccttaccatgtaaaattctgattatgtttgcacggtgtaatcagaaaacaaccacagttaaaggtcaatatcacaagcaaaaaaataaaatgatataccattcattttgataagtaatcgactttagaggatcactgttaaagaagtataaataatcaagtcagggtattaagatgattacagctaacacaaagaatgtaataagacttgctaaagaaacatacttagttattaaagtaatcattatccaaattaaaagacagattaaaaatcatcataaagatattgcaagtaaagatccaccagtagtagcaattgccttaccacccttaaacttaaaatacagcggaaagatatgacctattgtagctgcaaaacaacttaaataacttaaaaaataggtgctttgatacactttttctgttaaataaccttgtaaaccaaaacggaataaaattcaggttaataaaaaagcaaaaaaacctttaaatgcatcaaaaatagccaccaaaaaaccaatttttaagccaaaaacacgcattgagttagtagctcctgggttttttgaaccaaattccctgacgtttttcttgagtattttgctgaaaatatcagcaaaaataattgaacctaacagataaccagaagctaggctaaaaatgaccaaaatggcaattgcactagcttgattcatagcttgtaattatcttatttaatgtttcaattatcttaagatccatcaagctaggtttttgtttgggttgataaactctcaataggcattggtagtgtttcattaaacagtgtttatctttaaagttaattagctttggtcctaaaataaccaattcctttgttaatttaaacggtttttttagtttttcaataaccaaaataggatatataaactctcgatcctgaactagtgtttcattaacaatatcccaactgtttaaacttaaaaaactacgtaattcaattaaattagattggggttggattacaaaacgattaataaagttttctttttggctaattatgttaatgattttcaatccaccaagtccagcaattacccctattttgggattaatatttagttctggaaggttattaaatccatcactaacaaagaagtggatattattgttatttttaaatttttggtaattacttaataaagcatttttactaatatcactgttaacaatggttaggttttgattagtttttattagataggatgttagataggaatgatcacaaccgatgtcatacactagcttaggattaaatgattgaactaaattagcaattgtgctaatcctttttttcattaattcttagaaatgacatactaataggattgtttctaactgcatgtctcaattttctaattgctttgttttcaatttgtctgatcttctctctagggatcaaaatcttttgacctacttcatcaagtgttttaggttcattgtaagggggcatgccaatccgcattctaacaattaactcttcttgttcagaaagattattgttcaacaattcatcaattttttctgaatttgaacggctttcggtaaactcgtcaggagtttgagcgtctgtgtctttaacaaaatcaccaaactgggactcttcatcatgtccaactgttttatcaagcgaaactggatctaaacttaaccgtttaatttcagcaatctttttaacattaaatccttcagcttgtcctcccatcttttcagctaactcctcatcagtaggttctcgccctaactcttgatacaaagcccgttctgctttagctaagcggttaatggtttctaccatatgaacagggatccttactgttcttgcttgatcagctattgctcttgtaattgcttgtttaatccatcaagtagcataagttgaaaacttattccctaaagatcagttaaatttggaaatagcttttaaaagccccaaattaccctcttgaattaaatcattaaaatccaaccctctttctaggtgttttttggcaatagaaacaactagtcttaagtttgaagtaaccaactgattaattgcatacttacgtgactcttcatcagtactatttaaaaccttggcaatccgctgttcagattcaaaatctaacattttagaaaagtcaagtgatcctaaaaagaacctaacattatcatcaaccttatcacggttagagatgttcttacttgttaactcttcaatatcttcatcaataattgaaaggtcttggttagcacgaaattcatggatgtgctcttcaacatcgtgttggagttgaatccccttatcacgtagttcatccaaaacatagataatttcatcttcaggtagttcaaacttagcgagaacactaataatttccttatttgaaagcgtgatgtttttttgtttctttttgcttttcttttctcaagcttctgttagaaggttgatgactgtgttggtgtcatcattttcaatgtggctttttaacgatccttctaagatatcaaataacttcagattatttttttcttttaaaggagcgtgtttaggttttctaccccttctttttttaggaacatcactctccttattttcatgaagggttttgagaaaagcgatgttttcatgacggtgtttgcgttgcactttattgtcaacataaatcatctttttgtaaggacgattcttttcaagaatacgctgttttttaagttcagcaattaattcttcagatagttctggtttggttgaattgggtttttcgcctagcgtttttttgtcagtggacatttagctcaatgcgactagcattataattttagcttatataacttttatagcgttaactttaaattttttaagcgctgcttttgttgttttaataacgtttgaaaggtctttagatagttttgaaaatcattagcttgataacaagttaattcatctaaaaaaatatctttaatttccaataaccttgctttattgtttaaaaggtaattttgatctaaaacactttcaaaaccaactcagttagcagtttgattttcactccaatagatccttgctttttcaataaaaagttcaacatcaaacaaattaaagttacattccttaaaaacttcatctagatgggattgttttaattcaaccaaaaagcgtttatcaattaaagcaaacgcaaagatttcaggttttcacaactcattaactgcttcttcaaaagctgtttgcactagtgctgcagtggttttttgcaattcttgtggtggttgagcatggcctgaagtatttatgtaaaaacggttgttatcaaacttagatacaagtttttctttgtgttttaaaactgtttcatacagagttttttcatcactatattcaagtagtttaaccaaatttttaatgagaaaaattaaaaaactatggtcgtttaaaattgtttggttttttgttaaaaaagcaatgattttattagtaataaccctttgatcaagttgttgctttttaaaaaaactaacaagatattcaattagattttgtcttttgtttgcttgtaatataacttgctcactacccttgtttaaatacagttcatcccaatctttatagttgtgttctcactgaacaatttccacaataaaattgttgttattaagtttttcaattaagctaaacacagcattttgaccactagcatcattatcaagtgctaaaactaaggtttgtaactccttaaagtgagctttaatggctttaatttgcacatcatttaatgctaatcccattaatgcaacagcttcaaacttggagtttgttagtgtaaaaacatcaaaataaccttccacaataaagagttgattgaggtttttatttaacctgtgaaagttaaataacagctccccttttttaaaaaattcgtgatcagcactatttttatatttcagtttgttgatgttatcaacacttcttgctgaaaaaccaaccgggttaccattaaagtcatggatagggatcataatctggttttgaaaggtagcttttttggtattaaagtcaaaaaagccaagaccttgctggttagtttttgaaaaaagatacaattcactcggttttatctttggattaatgaaggggtatctttccatactttcacatagatacttatcttcattgtgaaaagcaagtcctagctgaaactgttcaattaatgttttattaagctttcttttttcaactaaataattcatcccatttgggtttgtttctctttttaatctggtttgataataagtaattaaagcattgtttatctcccaatatcgtttttgttttggatcaacttttgttagtaaattactgttccaattttctaacttaattccacaaatttcaattgcttttttaagtgcagtttttcaatctaactggtcatgcttttggataaacgctattccgttgccagctgcattacaagcccaacacttaaagatgtttttagaactggaaatggacatagaaggatttttatcatcatgaaaaggacataaagcaagtagactattacccttagtttggattttaaccccgtagtgttgaataatttcagtaattttaatctgctttaaaagttcatctaaactgttgcttttattgaccatttttcatgaatcattgtggtaattctttgatagcaattcgctgttgaactaaagtatctctatctctgatggtaactgcattatcttctaaactttcaaagtcaaaagtgactgcatactttattccaattgcatctgcttttcgataccttttaccaatactaccagttgtctcaaagcacactcttcaccttgtttttgctagcgtttcaaatacagaaaatgcttcttttttaagtttatttacaagtggtaaaacaataatttgttcaggacataagtcaaatggtaaactcaatacttcccgttcttcctcattaataatttctctcctataactactgacaattagtgcataaaataaccgttcaatgccaaccgcaggttcgattatgaaaggtaagaaatgttggtttaattcgctatcaaaaaaactcatgctcttttttgaaaactcttggtgttgttttagatcaaaatcacccctgttagccaagcctcataactcctttaatccgtggggaaaattaaacaaaaagtcagtagtttttttggcataatgagccaattctgattgatcatattcatgtttttttaacaattctgggttaatttttaacactgtttgtagaaactgttctaccattattaattgtttttcaaacagcgaatttgcatcatcaggtttacaaaaccactcaatttcaaactgttcaaactctctagttctaaacaagaagttacctggggtgatttcattacgaaagcttttaccaaactgggcaatagcaaaaggtaaattacgcttcttagcttgcaagatatttttaaagttaataaagctaccttgagcagtctcaggacggagaaaaacaaggcgtttatcgttgtttacaaccccgatttcagtttgaaaaagtaagttaaaatccctcacttctgatcaattttggttatgacaattaggacagttaactttaaaactattccaatcctttttagcttttatttcagcattaatttgatcaacacgaaagcggtatttacaactcttacaatcaactaaagtatcaacaaagttagctaaatgtcctgatgcttttcaaaccaattcgctgagaataataggggtttcaactaaaagaacatcagctttatttttaataaaaaagttatataaagcttgtttgatttgttgttttaaaactgcacctaatggaccaaaatcccaactattgtttaaaccgttgtaaatttcactactctgaaatacaaaaccatgttgtttgagaaactgaacataaacttcttggttgtaaactttagccattgttaattaatcttaaaaattagttttttcaagcaaacaagataatccctaaagcaacacttacatttaaagaattgatcttattgttcataggaattttgattctacaatctgcattctttgttattagttgattcacacccctatcctcattgccaacaattaagatttttttagcaaaatcaactttgcgataatcaattggttttcaaataggatccagagttgaaacaacagttcaaaatcctatttcttttagcttagtgatcgtataacttaagttagctacttgcactaagttttgataaaaaacactacccatactagttttcatgactgtattgttgatagggacttggttattctttttaaagataattccatcaacctcactagccaaacaagttcttagtatagcaccaaaattataagggtcttggatctcatctaacatcacaagtgtactgcacttcttattttcaactactttaaccagttgatcaagtggaattaagagttggttagtatctaaaactgctaccaattcctggtggttaatatctctatactgattgttaaatcagttagttgaatggatttgaaaattaatttttttagcttcaattaaaggtattagttttttgtgacgaatggaaatgtttaccaatttaatgtgaacttggttattaatcgcttcctcaaaggctttaacaccaaataagcaactttgttggcgtggttttttcattattacagcaacatttttttaattagtttttttctaatttgatcagctttatccattgctttttgtttgtgtaatattgatcactctttaattaaacgcacattaagtttagtatggatagatttaaagctaattcctaataaatcaattgatcattccaagaaactaagttgttctctcagcacactaaagtccttagttttaatacttgtattaattttttttattagttttcagatagcagcaactgcattggcaaagttgagattatcaagtaaagctgaaaaaactggatcatattgcttgggactaatcaactcagattgttctgaataaactaatcaggttctagcaacattaagtgtttttgcaatcctttgaatatcattattagctttttcaatcaatgattggtttagatcaataggatgcaaatagtgtttttggtaaaagatccaacgcaaaacacgaaaatcatgaaagttaagaaaatcaactgctaacaagaagttctgcaatgactttgacatcttttggttttcaatcatcaaatgaccaatatgcatccaatgtttggtaatgggctggttatataaagccatgtgtaaggcattttcattttcatggtgggggaactttaaatcaactcctcctccgtggatcgtgagttcatttttgaaacaataatcaattaagaaggcacattcaacatgtcaacctggtctgccaagtccccacttactatttcatttaatccctgcagtagtaatctttcaaagtacaaaatccaatttgttctttttatcagtatcagtttcttctaaatgcaccattcggttagctagataaccatattgctttagtgaattaactgcaaaataaacgttgttttgagttgaaacataagcatggttttgatttactaattgatcaatatagtcagggattttatcgattttttcagtgatttgaatatgtttaataggcagaatatttagtttttttaaaagtgatttgtaagcagtgatttgttgttttgtaacaactgattcgcttacttcttgttgttgagcaatcttgatgatcttatcgtcaatatcagtgatgttttgaacaaaattaacggtatatttagccttttttaaaactctatttaaaacatcaaaaacaattaatggtctggtgttgcctaagtgcaaatcgttataaactgtgggtccacagagataaatgttaatggttttttgaactagtgttgttggtttttgactaacactgtcaacaatcataaacctatgttcaaattgcttcattaatgataggaatgttcagttctttggcgtgattgatttttcttaaagttggtttgtttcctgcaataacaaagtcaactgttggtttgacttcacttgcaaactggcaatcaaacttagctgataataaatccttaatttggtcacgactaatgttaaagctaccggtaataagaaagcgtttttgaaaataaatactgttagtttcaaagttaattttcagtggtaattgatctgtttttacttgtcttaattcaagttgttcaattaactgcaaatggttagggtcatgaaaccagttatacaatgattcagctactgttattcctacatcatttaaactaattaagttctctaagctagcatgctgtaatgctttgatatttttaaaatgattagctaaattcttagctaatacattaccaacatgcttaataccaagtcctgttagtaatctagccattcctttttgttttgaattttcaatgttatcaactaacttgttgaaaagtttatcaccaatcttcagatctaattttaaaacttggtttttcttgtcttttaaatcataaagatcaactatagatctaaccaaattgtgttcataaagtttggtaatagtattaatattcaacccgttaatgtccatagcagttttagaaacaaaatagttaattaactggatgtttcgctccttacaagtttcattggtacaatactgatcaacttcatcaactattttgactagttttgaattacatgaaggacaatatttttgctcttgaattatgatagtgtcattttttcttttttcaagatttacctttagtactttagggataatttccccagctttatagataacaacagtgtcattgatcctaatgtctttagttttaatgtaatcaaagttatgtaaagtagcagctgttacttttgttccatctaaattaacactttctaatttagcagtatagttcactctaccagttctaccaatcgttataagaactgctgttaatttagtttgaacaaatttaggactaaatttaaatgctattgcccaacgtggtgatttacttgtagcacctaattgttgataaaaaagcaagctgtttagtttaataactaaaccatcaagattaaaagttaactgttctcgttttttgtcaaacgcttccaagtaattaattaattgaaatttgttttgaaaaaccctgatggtatcactaactgggaattttcactgcttaagctgttctaaaaccatagtttgagtagtgattgactcttccaaaccattagggatgtaataaaataatgcccttaatttgcgctgtgcagtgatttcactgtttaaattacgtattgtacctgctgctagattccttgcattagcaaatggtttttcaagttgattgttaattgctaaaaaagtttttttatcaacaaaaatctcacccctaatctcaattgtttttgtgaaagggattgttaaagggatagatttaatggttttaacattatttaaaacatcttccccaacacttccatctcctctggttaaagcatgaactaaaacaccatttttataagttagagagatactaactccatcaattttaggttcaactacaaattcattttttgagtttgtttgaaagttaatattatcaataaaattagcaatttctttagttgaaaaagcattttccaaagagagcattggactgttatggtttaactttttaaaacccttcacagcttctcctcccaccctttgggtaggggaatcaatttggattaaatcaggatgatctttttctaattgttggagtgacttatacaacatatcatactcaaaatcatcaattaaaggttcgcttaaaacatagtagtgatagtcatagttttttattaagttaaccagctgttgaatcttcaatttcacatccatcactactataaataagaaaaatcctgacttagttgataccaatcaggattttacaaagaagttttaatttggagcagataacgggaatcgaacccgcatcttaaccttggcaaggttatgttctaccattgaactatatctgcgttgttactttaatatttagtatattttaacttgcatggaatctgaaaaccaaattgcaatcctggattatatttttaaccaagtcaaccagcccaatcaaccaaaaatagtttggttctctggggaaggggaggatgagaaaattaattttttaatccgcttaaatgatttttttaaaccaaaatttgttgaaaatactaatgatagtagctttttattaagttttagaaaccatgttgaaactaaaaattcaacgcctttaacccaagctaactttgctaatattgccaacaaattactagcggttttatttggttcattgcaatgaaaacagttaaataaaccaactggaaactgatttcttgtaattttgtttttagctttattatggttaagacaatgctgactaaaacttcagttaactaagataagtaaatttgtaaaccaaaagggcattttgagttttattaaacaacaatggcctattctaacaacattggtaacagtagggaccacattaggtactccagtattttcattaacaatagcccaacaagatggtattaagcaaaatgcggggaatgatgtctttatctttttgattatcttctctgttttttctattagtttagggcttgtttcatcacttatctttttagtctccagcttattttcaattcgtcagaaaaaaacgttggatgctttggataaagtgttatcaaaatttattgataaatacttttttttagatgaaaaagagatcaaaaaacaacttaaatatcagtttaaaaacaacggtgtttgctttttttatggttttgattttgatcaggcagagtttcttgaacaatcaatgaacttaatgttgttgttaaagcaaaccaattgttttattttagttggttgtaaagaaagtgaaatgacgctcattaaaaacaagatagaacctaacattaacttaaaacaaaacagtttttatctggatttaagcaatgaaatttcacaagtagaacagatcagcaaatttaacttgttgtttaggcaattgaggctcagttctgaactattttacttagaagatttttttgattatctaactactgcaaaacagatagttaactttcttttttaaaacaaaacctaaccttgatcaatttcaagaaaatcaaaagaaattatttgattttttagcgttatgagcattagtaattggtactgattttgagtttaataacgtgttgtgatcatttaataaccactttgtaattgataacagttttaaacaggaatatgacaaacccaacattactgctttctttaatcgttctttgcaattttttcaagaaaatagcttggttttaaaacctgaattgtttagtttgcaaaaatacacaaaggatgtttatggtttaaatgttatcaaccaactaaacttaaataagcaccctatgctaattccattaacatgggataaaaagcaaaagtttattagctttattgaaagctgtgttcaaaaatacagtcaagttaaaaaagataaccaggtatttagtttaacagttggtaagcgcgtcttttttctattattaataaataagcagtttaaacaaattaaacttgaaacagcactaaagtaccttggctttaaaacttcccttggtgcaatggacagcacaactgagtcctaatcagtaaatagaggttcaactcctctagggaaggccaatttatgataaaaacttagttaaattgctaggtttttatctagttttagggggtgtagtttagtggtagaacaacagtctccaaaactgtctgtgtgggttcgattccttccacccccgccatttacagatgcacttcaattcaaactttaaagaatgctttaataagattgcaaaaaaagttaattcactggacagtgaatactatgagttttcttcttttattgaaaggattagaactacctttggacttttaattgctttaactgttttaagtaacctaatcattattagctttgttttaatttgattttttactgatggctttggtcagttaaggctgttattctttacgctttttatccccttttttatctctttattagtagcaatctttctaatctttcttaacaattcattccgtaatttttttcagattaatgaaaagaactggctgttcttatggacctgtgttttttcctcattaccaatctttaacttgtggttaattgtgagattaaataaaactattaagaatttcgctagtgattatggttttaagattgttaataaatataacagtttaacaagcggaatttttgtgtttgactttgctgattatgttagttttgaagccaacctgactaattgaaaaaacacaaacgataaaaatcgtaattttgttaacttctttgaaacaataagcaaagaaaaaactggtgttgttcaaaaaccagttcttaactttcaaagattatatgttaatcgtttgtactatcaaagtaagctaagtgttggtagcaaccaacagactccccaaactgcttttgataacctaagaaactatgttgaaaacaaacagcgtgaaacagtaagggttaagcagtatatcctcacttaattaagtgaatatattaatatttattggtctttgtcaaaaaataagatgaaaaaggcaatccactttcagagtcaaccagttgtttttaactgtgcttcatgcaatagcaactttaccattgactccactgccaaacaaaaggatcttgccattgacatttgtggaaaatgtcatcctttttacatagggcaattaaccaaacaaaccgtgcatggacgggctgaaaaactttctcaaaagttcaacgctggaaaggcttttttagaaaataaaactaaaaagagtaaccaagctaaagttgaaaaacaaactaggcaccgttctattaacgagctttagtggattttgacaaacaactctttttcaatgttgaaaagattgttgaacttactgaacaacttgaaaaagatctcaataaacctaaccttagctttgagcagattaaagttattaacaaagagttaaaacataaacaacctttaatagttaaattcaaggagttgcaaaagctggttgaaaatgctaatgaagctgaacaaattcttaacaattccagcttaaaagaattgcatgaagaagctaaaaaagaacttgaaaaaatcaaagctagtttacctagtttagaagaggaaattaagttccttttactaccggtagatgaaaataaccaaaagaatgttattgtagagatccgtccagctgctggtggggatgaatcttgcatcttcttaagtgatctttttaatatgtacaaaaactattgtactagtaaaaattgaacggttgaacttaatgaaattatccctgcaagtgtggggattaactttgtttcttttgcggtaaatggtactgatgtttttgctaaactcaagtttgaatcaggagtacatagggtgcaacgtgttcctttaacagaagctaaaggtagagtgcatacctcaacagttactgttgctgttttacctcaattagaagaggtagagatcaccattaatcctagtgatttgagaatcgatacttaccgtgcttcaggagcgggtggacaacatgttaacagaactgaaagtgcagttagaattacccatctacctacgggaattgttgtggcttgccaagagggtaaatcccagttttctaaccgtgataaagcaatgaaaatgctacgtgctaagttatgggaaaatgctcaaaataaacaactctcaacccaagcggatttaagaaaaagtcaagttggtagtggagagagagctgaaaaaattcgtacctacaactatcctcaaaacagaattacagaccacaggattaaattaactattaataagcttaatactgttattttgggagatcttgatgagatcattgaagctttacaagctgatgaaaagaaacaacagttggaaaagtttattagttagatgactctgtatgagttttttttaaatcaaaagttagtttaccaatccagtccccattttaacggggtatttttaacaatattggaacactatggttttcaatttaaaacaattgataaactctgaaaaagtaagcttctaattactagtgagttaactgataaaatcaaacaacaattaaagtgttattttattgaaaagatccctttgccctatttgttgggaacaattcaactaaggaagcttacttttaaaactaagaaaggagtttttattcctcgaattgatagcttagcactaattgcaagtgttaacttaaaaaaaataaaaactgcacttgacctttgttgtggttcaggtactttagccattgctttaaaaaagaagtgtgatacacttgatgtttatggtagtgatattgatatccaagcattaaaactagcgcaacaaaatgcattaattaataacgttagtattaattgaattgaagcagattgatttgattgttttaacaagataaaaactccgattgatttaattgttacaaacccaccttatctgaaaaaaacacaactaaataaaacattaaattatgagcctaagcacagcttggtttttcaaaataaaaatagttattttgcatacaagcagttgtttaatctattactaacaaaacgatcaattaaacagttaatttttgaatgttctttatttcaaaaagaaaggctattaaatttgttttcaatctttaaatcaaggccgatttttaactttcaaaaacagtttattggtatgaaagttgataatcaaaaactcccagtagttgatattaaaaataccaaaactattaagcaacttttaaaaatggggctagcaggaattgtaaatactgatacacaaatgggattaattagttattcagagtctactcttgacaaaattaaacaacgtgcacttaacaaacattatgtatcaatgtttgggttagaagaattaaagaagttaccaaaaaaactacaacaaattgctagttacttttgaccaggtagttatacctttattaaaaataacaagagctacagggttcctaaaaacttgggcttattaaacctttttaatgcaattggtagggttttttgtactagtgctaatatcagtaatcaaaaaccatacaccaaattaagtgattatcaaaacgatagttactgaataaagcaaccttgttttattattagaagcacttctaaagtgcaatcaaataacacaccttcacttgtctataatttagatacaaaacagttggttcgcaccacagctaaacaaacaaaacagtttcataaattaataactaaacaccagttagctatctaatacacaaaccaaaatgaaaccaaagataataacaagcttttcaatataaaaatgcttaattcagttttatttttgaaataaaactattttttttaattagtatatagcatcaactactaaaacataagggatgaagctcaaaggttttttagctgttggtgttagtgtttttggtttttctggtttactgatggcttgtagtgttgtaagtcagtttgatcaagtggatgatggcaaaattaagctagcatcttcattaacttcgaaacgcgcagcggaagctttagagacagtagttaaaaaatataacgatactaaagatcctggtgattatccaattgaaatagtacaaattgctgggggttatgatgggggtaaaaaggatgttcaaaccaaggttagtaccaaagataaaaataacttttataacctgattttaaactatccagaaatagtaagtaccttatcaaggtctaaaatggctttgaattttgatggggttaatgttgataaactccatcctaactttttaagctttaacagcagaataggtggaattagagatgatggaatctatgctattccaatatctatgtccactgatctgatggtcattaatggccctgttttacactatattctaaacagtgctagaaaagaaggtacaccaactagcactactgttcaagcaactgtcagttcaagaagtgcagaaaaaaaaggtacattagaaattgcaaatgatagtgaaactactaaactttgacagaacatccaaaccactgctcaaaacaacagtaatgaaacaactaaggagcaaaaacaagtaaaaagatctagtagttcttcatctacaacatctactactggtgaaactaaagatactacaaaatcagataacaagattaaagagttttggggtgaatatcaagaagtggatggagggttaaagaattttacctttaaagcaagcatctttgaaaactgaaatgaaacgttagattttgctactagaatagcaaactcttttcctgaaaaggttaaaaatataacaaataaaactgggcttgatttacaaggtgttttaggagttgatagtagttctaatgcactttatgcagcagtttttgcagctggtcaagctaactatgataacttcttttttaacatcgataaaagaactggttatgcagattactctaactttttaaataaagatagttcataccaaaatttagagagtgtttacaatgacttttataaattaatccaagctaatggtttgtttgttaaccgtggtggttcctattcatccaactttgaaaaatttcaccaattggcattctcagtatcttcttctggaggatacagttattactttgctaaagataatgctaagcgcttaaagtttagtaattatgctattgaatatcctagttttacccaaacaattcaagctcctaattcttcagaaacagaaagtaatttacttggtacttttaaattaagtgaaaaagatatcaatctatataaaggttcaattcctagtggaaaacaacaaggagttgatgctatcttaattagtaacccaaacttaattaatattcttgaacaagcaaaacaaaaaaacactgcacaaggaagtgaatcaaccactaacaagataataggttataccaccactgcaaatgttaatgttgataatcaaaacatcttttctgttagcaaacttaacaacgaacagtttcaaagaaaaatcattgttaatgccactgaagaaacacttgatcaatcccaaaccttacagagcaatgaatcaattgttttaccaatgcctggtaaatacaaatcaactgataaaaataaagtaatgatcacccaaggtcctaacttaataggcatccatgcaaatgaaaaagaaaatattgaaactaaaaaatttgttaattggtttttaaatcaaagtattacagattggaatagtaataatcagcaaaaaaatagtgatcaaacaacaaaaactgctgctgaatatttcactgatcaagcttcttacatccttcctttaaaggaaaaatttaacaaaagttcagatttagaattgaaaggcagtagtagttcttctaatttaacaaccagtagtgctagcgcctctttgttaataagtaataatagttcaactgcaagttctcctgctcctaaaaaaacaaacaataattctaatacctttacagctaaagcactagaattattccaacaagctgctaacaatgaaattattccctttagtgatccaagtgactttaggaacggcacattccgtaataatataagcagtagttttaatgctgcggtgaattctaaggttagttttaatcaatttgtccaaaactttattaatagtttaggatctggatttagaagataattagttaacctcccccaacctctattttctgttactagtgcctaaggtggcattagagtatcacaacctgaataaccaagtagtcaaagagagtttggaagtggaagcaactgattcttttgatcccacccaagggttgcaaaaagatagtccagtgaaggattcaagtaaacaaggggagaaactccaagagaccatgtcatcaatgagtggtatggctacctctacaagagataaagccctcaagattgaggtggaaagggggagtcaaagtgattcacttttaaaaaacgactttgctaaaaagccactgaaacataagaacagtagtgggacagaggtgaagttggattcacagaaggattttccccaaggaaaggtttgaaaaccggtgttgaaaacagatgagatagaaaaaaatagggggatgggggcgacttagactttctcccctgaatcggcaatggtaaacccttctccaactccccctccccttcaacttccgcttcctcaaccccactccccactttttctaacattggcgtaggggttaaatcaatgatcactcaacacttaaatcagcaaaacacccggtgggtgtttacacctggtagtacaccagacatttgaacaggagcaggttatagaaaagctaataacaacaataacggcatcccttttgaacaggtgaaacctagtagtagtagcaacacgtttaatcccaattcagatgataataaagtcacaccatcaggtggctcctccaaaccaaccacctacacccatttacccaacagtatcagtcccaccagtgactggatcaacgcattaaccttcaccaataagaataacccccagcgcaatcagttgttgttaagagcgttattaggaactattccggtcttgatcaataagagtggaacgggagatcaatttaacaaggatagtgagcaaaaatgaaacgaaacagataaattaggaggcaacctcccggggtttggggaggtgaatggtgcttcttataagatttttacttatttaataattaaaaaaagtgttaggtttttttagttttttatctatttaatatttaagaaattctcaaatttttcttagttttttatttgtttaatagttaaaaaaagcgttatgttttatctattttattagttaaaaaagttttgaatttttatctatttttagttaataaaagtcttatgtttttatcaaatttttatctgttttttggttaaaaaagttttagattttctttcttaaatttatttattaaatagttaataaaagtgttaagttttatctatttttaattaataaaacctcgacccctcttcctatcaaatcgctgaccaaaccatccataacaccaacctgtttgtgttgttcaagtctagggatgtgaagcttacatatagttcaagtggctcaaataaccagattagttttgattcaactagtcaaggtgaaaaaccctcctatgtggtcgagtttactaattccaccaacattggcatcaagtgaagggtagtgaaaaagtatcagttagatgtaccgaatgttaccaatgagatgaacgatgtactgaaagaattgatcctagaacaaccccttaccaagtataccttaaacagtagtttggccaaagaaaagggcaaaacccaaagggaggtgcatctgggtagtgggcaagcaactaattgacgatcgatgcgtaactccattggtctgaatgacaatcccagccccaatgcttcaactgggtttaaattagacaaaggcaatgcatatagaaaactaagtgaatcctgaccaatttatcaaccaattgatgggaccaagcagggcaaagggaaggatagtaatgggtggagttcaactgaagcaacaatggcagcaggggatgcgcccctaagtacaggagggagatcatcagatcaaagtaataaattcaccaagtacctcaacaccaagcaagcattggaaaggatcggcatcttgtttgatggggatggaatgaggaatgtggttacccaactctaccaacccaacaaggtgaaaagtggtcaatatcaacaaaataacacctacaacaggttaattgagcctgacaatgcaacaagtgcagcgagcagcatgaccagcttgttaaagctgttgtctagtaaaaacatcaaacagaagttggggaaggggggaacagcaatgcagggaaataatggtggagggggtgttagtcaaacgattaacaccattaccactacgggaaatattagtggcaatggaaccattcaaacggcttatccggtgaaaaaagatgaagcttcaaatgtagcgatcaattccttgattaacgctacgcccttgaatagttatggggatttaaataatgctagtttttctaaataattaaattgttaataacaaaaaaatctctattaaaaaaaccaactttaaagttggtttgaaattctaaatggcgcgcccaataggacttgaacccataaccttctggtccgaagccagacactctatccgattgagctatgggcgcatatattaataaattttattaatataagcaagaacaatctaattctttattagaatttaaacgatttcatctaatagttcaaatcacatatggcaaaagataaaaaaaataaggttgatggaacagagcaatcagttgatctatttgaacgtacaaaacttgaagatacacaagttttaaatgaagttgaacttgatgatattaaaaagataacagagcttagaaaagaacttgaacatacttttgaaccacaaacaagaatgcaaattaagcgtgaaattaaagaaatagaacgcaaaatgaaacgttctagtcgctaattgatgtttgttaatttacatacaaattcatactataactttctcaattctgccctttctcctaaaaagctagttaatctagcaattaatgatcagcaaaaagctgttgctattacagatcctaatctttttggcgctgttgaattttttataacttgtaagcaaaataatattaaaccaattattggtttaaacttaactgttgaataccaaaaaaatgatgttaagttattactaattgctaaatcaaataaaggctttcaaacgttgaacaaaatagcattaattcaacaaaaacttgaaattaattctttagttgatcaactaacagatattgcagtaattatctgttctttaacaacatgaaaatctacttataaggatgtttatcaagcaaaaggaattgaaataaatcaaaccccgattgccattcttgcaaatgctgttaactgtgaaaaaactaatagcgatcaagtagttttaacagttttgaaacaaatgaaacaaaaccaaacgggaaaaataactacatttgattgggatcttaaacaaaaattaaatcaaatttcaattaatgaaaatttaaaagtaaagagtgaaattcaaccttttttagatcaaaaaactgcacaacaattattcagtgaaacagaacttaataatctgaatgatctagttaatagatgtgaattagatttggagcacctaaaagctgcttcactttctttaactgataatgatgcagcagttttagaaagtttgtgccaaaccaatttaaaacagtttttagataaaaatcaagatctaaataaaaaagcctatcagctacgtttagagaaggaattaaatgttatcaataaacttaattttgctagctattttttagttgtcaatgatcttgttaattatgcttttaaaaaggacatcttaattggttctggtagaggttctgcagtaggatcattagtggcttttttattaaacattaccaagatagacccagtccaacaccagcttattttcgaacgttttatctcaacccaccgtcaagatctacctgatattgatattgatatcatggagaataaaagagcagaaatgataaattatctgtttgaaaaatatggcaaagaaaactgtgcacaaattgttacttttcaacgttttaaaacccgttctgctgttaaagaagttgctaaattatttaatgattatggcattagtgacatgatcctaggagtgttacctaaagatcaaactataacattcactgatcttaaagctactgaagatagtgctttacaactttgtttacaacagtttggtttaattgttgaattagcactagcaatagttgattttccaagacaatcaagtatccatgcttcaggcatagttatcgcttcaaattctttgattaaaaccattcccttgttacagcttgacaataatcactttttaactcaagtttcaatggaatggttaagtttttttaatctcaataagtttgatctgcttggtttaattaaccttactatgattagcgatgtaattacccaaattaaaccatctaaccagaccgttaaccagtttttaaataccatttcttgaactgatcaaaacacctttataaacttagtaaatgaagatacactaggaatctttcaacttgaatcgtttggcatgaaaaaattactggttcagattaaacctaaaaccattaatcaactagcaattgttctagcgctttacagaccaggtgcacaggataacattaacctttttattaaccgcttgcacaatggttatgatcaatctgacattgatcctaggattttacccattgtgaaaaatacctatggagttttaatttttcaagagcagatcattaacatcgttaaagttgtggctaactactctttagaagaagcagatagcttccgtagagccatttctaaaaaggatgttaaattgatccaaaaaaataagcgtaacttctttgaaagagcagttcaaaataactttgatttaaagactactaccaaaatttttagctacatagaacgctttgctaactatgggtttaacctttctcatgcgttgggttatgcactgctttcatactgaacagcttgacttaaaactaactatcctgtttatttttatttatggttattaaaccattttcaatctagtaaagacaaacaaaaactaattattagaactttagaaaaaagtggtattgaaatttatccacctcttttaaataaagctcaaccaaatagtgttatagaaaataaaaaaatttatttaggtctaaacctaattaagggaattaatgacaggtacatccaaaacttacaaaaagtgcaacatttaattcaaactcaaaataacttacaactaactgatgtagtaagttggtgtttggataaaaccattggtgatatccctttaaaagatttacttttattaaaaactatgggctgttttgatttttttgaatacacttatgactttaatgatgcaaaggatttttgaattaaaagcgatcacctattgtttaccagaatgcctttagaaaaaaaggatagtaatttttgaattaaacaattttttaccaattagttgaacatgaaaaaagcaatcctgattgatggcaattccttagcataccgtgcttattttgcaacgtgaaaacaagttgaatatgctaagcaaaataatttacctttcaataatgcaataagaacaatgttactaatgtgttggaatttaattaaagccaatgtttatcaatatggaattgtaagttttgacactaaagcgccaactttccgtgatcaaatctatgaaggatataaacaaaaaagggttaaaactccagttgaacttttagtacaaattcctctaattaaacaagcgcttgtttatttagggtttttagtttgtgaaaaagatggctttgaagcagatgatttgattggtagttatgccaatttatttacaaagcaagaaataacagttgatatttacagttcagatcgagatatgttgcaattagtaaacgcctttactaatgtgtttctctgtattaaaggtacaaaggagatggttatgtacaacaatgaaaatttcaaatcacttttttatggtttggcgccctatcaagttgttgaatataaggggttagttggtgataacagcgataatttagcagggattaaagggataggtcccatcaaagggatagaattactccaacaatatggaaccattgataacatctacactaacttcaataatctccccaaccaacttcaaaaacttttaaataaccaaaaggaaatagctaaaacctttagttttctagctaaaattaaaactgatattgaacttgatcaaaacatagatcttactggtttaaaaccaatccaaaaacaagcgttaattcaacttctaagtgaaaacaaaattaatactttagttgaaaaattttcaaaaatataatgcctgaacttcctgaagtaactactgttattaatgaacttaaagaaactgttttaaataaacctttagatcaagttcaagttaacctaagaaaggttttgaaaaatattgatcctcaattgctgaataaacaattaaaaaatcagttttttactgatattaagcgtaagggtaaatatatcatttttcttttaagtaatggtttgtatttagtttcgcatttacgtatggaaggtaaatacttttttgaagaaagaggtagtaaatttaatcaaaagcatgttttagtagaatttcattttgatgatggtagtcaactcaattatcatgacaccagacaatttggaacgttccatttgtatgaaaagttagaacaagcagcacaattaaataaacttgcatttgatcctctagaagctggttttgactataggaaaatcttccaaaaagcacaaaattcaaaacgtaaagttaaaacttttattttagaccaaacagtgattagtggaattggcaatatttatgcagatgaaatcttatttgcaagcaaaattaatcctgaaacaatggttgatcaactaacaattaaagagatagagattttatgtaaaaatgctaccaaaattttagctaaagcaatagttatgaaaggtactaccatcagcagctttagttttaaaaaagatcatactggaggctatcaaaactttttaaaagttcacactaaaaaagatcaaccttgctcagtttgtaaccaattaattgttaaaaagaagattaatggaagggggagctatttttgtttaaactgtcaaaaaatcacaaccaaagtttctacaaaactcaatccataaattttttaaaactttaaatatcttaaaattaacttttaacaaactaattgaaaactttatttaacaaagtaatgctgtaattaatcaattagttaatgaacattaaataacatttatgaaaaacgaaattaaatatctttattctgacttggatggtactattgttagctgaaatcctaaaacagaatttgtttatcaaaataaaagttataaaaatttccatgaagttagtgatgctactattagtgctttttaccgattgcaacaaaagggaattaaggttggtattgttactggtagggattattgtcgggtgttatgacttgaaaaacaacttagaacaggattgcctaccattactttagatggggctattatcttttatcaaaacgaaatcttaagtcaaacttatttagatgatagatttattgaagggattaataacatagtaaagcgctttcctgaagctgcttataaacttaacagtggttgaattagttactttactaaaaacccttctgttatctttgaaattgattatgcttttcttggctatttcaaccctaacaccaaactacaaaaaaagtttatagacagtactgaaaattgagatcttaataaactaaaagttaatcaggtttactttgatattgatacttgccccttagcaatgcaaaaggaaataattgaactaattagtgttagtgatgtaaatgccaaaatctatgagcactctatgtacattattaaaaatggtgtttctaaagctagtgcattgcaaagccttaaccagtttgcaattccaataacaaaagataacactattgtttgtggggatggagataatgacattgaaatgatgcagtgagctaaacacagtgtctcactaatcggtagtaatcccaaatgctttgctctagcaaaataccacactgatagtgttgacaatgatggtattgctaactggattgaaaaaaacttgttatgttaattgcaatcgtaggtaaaccaggtgttggtaaaaccagtctattgcaatatctcaaagataactatcacttttcagttttttatgcagatagttttatccatgaacagtaccaaaaaaacaatccaggttatcaattaatcatggatcattttggcaaagagtttgtcaatcaaactgaagttgatcgtaaaaaactagcaaactatgtttttagtgatgataagttaatcgaaaaactttcactagtaacaaaaccgctgttaatagcgtgaatcaaatccttaaaaacccagtttcaaaaaaagctagcactaatagagattgctgtgatgcttaactattgaaatgaatatagatcgttgtttgattatgtgattaaattagaaagggatgatcagctagttaacttagctttacaacaacgtaatagtcataaaaaagttaaggatttgattaaagagcctaattgcaaaatagatacaattttcaacaacgattcgattgcaacagctgctttaaagctaattaagttgctagaaacttttttagaaagaaataaatgccgttgtgattgttgtcatattcagtaataaacttagcattttttttagctaaatcagtgccattaaccaaagcaactggccatttaacactttgaaatatttcaacatcattatcagcatcaccaaagaccatagtcttttcaggatcaagattataattatcaactaatactttcaatccataagccttattaacatctttttgcatgatatcaagagcaaatgtcattgaactcacatagttaatatcttgaatttgatctagttgttttgctagaaaaggaactttttctctgtttttagttaccagtaagatctttgtaatagtatgttgcttaaaatcaaaatccaaagctttttcaaacttgttaactatgtagttattttcaatgagatcaattcctactatttgacttctagttgaaagaattttagctgaatcaagctcatgtgtaaaagcaaaaacctttttatctgtatagaaataaaatgtttcttgaaattccaacaacatttgcataattgcaggtattactttattatcaataggtttgatatgaactggtttttcactagcaaaatcataaacaagtgcaccattggaagaaattacaggtagatttggtgtaataaaggtagctgtgtttctaattaaaatatggcttctaccactagcaaaagtgattctaatcccttttttctgtaaatcctttaaaaactcaactgtttgttctaatggaatttggttgcttgaaagcaaggtaccatcaaggtcaaaaataatgtttttcagttccatttagctatatacttttatctatttttttaaaagaacattaataattcgatcctgaacataaactaccctctcaatcggttggttgagaatgtcatttatctctttatcctgtttaaatgattctaaaacatctatctctaaactacctttagtaaattctttagctgctttaaatttgccattaattgaaagaataaccttagttttagcagtctcaaaaagttgataatcaactaaagaaatcgcttgtttaacaacaaatggttcaagtccacatttttcattcaattcttcagcaagaaagggcgcaaaaaacgacagtactgttaaaaatccctttgcataatttaagctaatttttttggttttatagagaaagtttaaaaagatcatcatttcactaatcaccagatttagttcatgtttgtcaagatgacaataactgttttttaaaaacaaattgtaagcaaagattgtctcttgactaacttgatcagtaacaacagcatgattaaaaaagaagttataaactcgatccaatcaccttctcatcccgtttaacccttcatcatttcaagttaaactagcactaattgggcccataaacattaagtacaaccttaaagcatctgctccatgtgaatcaacaagtggtgtggggttaatggtattacctttggatttggacatctttttaccatcaggacctaacaccataccctgattaattaatttttgaaatggttcttttgttgatactagcttcttgtcaaacaaaaatttgtgtcaaaaacgggcatacaaaaggtgtaaaactgcatgttccgcacccccaacataaagatcaactggaaggtattgatcaaataatttcttcgcttcttttgaatcaattggtcaaaaattagggtttttaatcaacattaaataacccagataataccaacaagaaccagctcattggggcatggtattagtttccctttggtaatggatgttatctttgactatgtttacccaagcttgatttctcattagtggagaattaccacttccatctggtttgtaattctcaagtaagggtaattcaacagggagttgttctaccaaatgaggagtgttattttcatcaaaaataattggaaaaggttcgccccaataacgctgtctactgaagatccaatcacgcagtttatatacagttgttaatttcgctttattttgtgaaattaactcattagtaatagctacttgtgcttctttagttgttaatccgttatatgcaaatgaattttgcagccgttcttttttatcaatgacgttgataattttcaacttttgtttacgtgcgaagaagttatcattttcattgtgtgctccaacacccataatagcatctgttccatatccttcaattacatagttagcaacatagacagggatcaattcatttgtaagagggtgaatagcatttgttaataaatctatcccatcatataaagttgctttttgctttaaagttgtggttttctggagttgtttttttaaaaaactagctacttttttatttgtttctgctatcttttttgctaaccaatggttggttgaaactgcaagaaaactaaccccaaaaattgtttgtggtttagttgtaaaaattgcaatagcttccttatgatcttttagttgaaagttaatagtaacacctttacttttaccaattcagttccgttgcatctctttaattggttcaggtcaatcaagtgtatctaagccttcaagaagtgcatcagcaaaagtagtgattttcaaaactcactgtttcatcttgcgtttttcaactgaaaatgaacccctttcactaactgcgttgccattactatcaattaaaacttcttcattagccaatacagtacctagctgttcacaccaattaacatcaatatcaactaattccgctaggtttgctttaaacagctcactgaagatccattgtgtgtatttgtaataacgtggatcagttgttttgagacttaaatgatagtcataatcaaaaccaaaactagttaattgattaataaagttattaatgttttgatctgttcaactgccagggttttgattagagttaatagcatactgttcagcaggtaaaccaaaagcatcaaaaccaatcggatggatcacattaaatcctttagctttgtaatacctacttattacatcagtgatagtataagctctaacatgtcctaaatgtaatcctgctgctgagggataagggaacatgtcaaggacataatatttctttttgttactatcgctttcaaagcggttaacatctttgttttttcatttttttaaccacttttcttcaattaaattgtgattgtacatctaattgctttgataagaacgcttgattgcatatttagttaagcgatagagtatgtcaacaataatcgcaataatcaaaccaaataacaacccaaagccaacagggataaaaaagtgaaccattgttttaaataagactggttggtttgcaactgtggcattaaaccaactgttaatgttgggaaaaatcgttaaaataatcccactagcatcactggaagcgagtaaatcagcccactgagctgtttggtatgtattaagtcaaaaactaccaataaaaataaaaaacccaattaccatcaaaaaaactaggattgcaattttcactagtttaaacaaaagtgtcattgtagttttcagtaagttatttcaattataaagttagataaattttcaatctaacttttgtaactttaatttttcaaggatcattttaataatagttactattggtagttttgcatctataatacagtaattaatcccaaaatcattacaaaccgcttccataaatccagtgtaaaccctgtgtaaattttgaaagtaaagttgatttttagtaaagttatcaatctctactttgcggttacgcataaatagtcttttttcaaataattttcaatccccatccaaaatgacatataaattaggaaccccatgcttattaactagttcttttgctaatctatttcacagttggttatagtatgaaaagactgcaggacgaatgatgttgtgcttagcaaacaaccagtcttcaaagatagaacgatcaaaaatggttggattgatagtgttgcaattgttctggtatttaccaaagcgattaagcgtaaaataaagctgaaacaaaggtgaatagagcaattcatcactacgttcatacatctttgctagtaaaagttcaaccaactggtcattagtttccaattcacaaacaacttttgcagcttgaatgtggttagctaatgtattagcaatggtggtttttcctaaagcaatcattcccccgatcacaatacaattagcaattttatttggttgaaaatggggcttttttagttgcatataaacactttttaatatgttgggttaaggtttatttttaataaaaaaccatcacactcactgacaagtcttaatgctgctccatttctggcctgacatgattcgactctaatgatgtgatggttctaaattctaacaattatttaaatcttaatcaattaatttactaaccctgttaatagaattggatttgggttgtgtagtgcctctaggcaatgaacttgaatttgattttttagatggtttgatcggttcattctcttgatctaattgctgttgtgacgctggagtttcttgttgataatttgttggcgttgaatgatcaagtttagtaatttcagctatcttttttgttagttttgctttggttttttcaaactgcttaatgaagttagtaaagccagtctttggattcttagtttcatcaaaaatggttgcaataatctcatcaagcttggtgaaatcaatttctatttcggtggtgagcttttggtgtttttgaagcgaatttacaactaacttatatgctttttttaatgcttgcttttctttttcagcggtttttaaaagtgattgggtttcactaatttccccatctttaagtgctaacttgtcttcaaatacggtttggatgtgttgatcacgtttataaattgcttcattacactgcacttcatattcctttaacaattcctctacattaatactttcatgttcttcaattagtttcttattggcttcttttattgcatgtaactgtttatttaatgcttcaatttggtgttcttttgcttctaccagctgctgcatttggataatttcactttcactttgtttgagttgtgagaaaagttcgctgttctgttgaacttgacggttaatctctccttccaagcgtaccttaagttgttcttgcaaacttaagatcctttttaaacgttctttttcacttctcgcttcaggaccaaacttttttaataacaaaacaagcatctggttccaatcaacattttttgggttgcttgttcgtagtttgacataagcagtttttgcttgttctaaaaaaacatcaagctgggctttggaagcaaagggaaacttggctaaaaagaagttaatagtttctcttctttgaaagtcatcaaagtctctatagtaatcaaaattattcatggaaagctaattctctaaagaagctaatgatagcatcaggatcattaaagtctaaatcataatggtgtctaacataaacactaacaaaactaaagattgctaaaacaaaactagtaaagaggaaaaaacgggagtttattgccatggtttttaacaaacaaatctaacttttcattagcaatttttttaaaactaactacatcactaaactggttaggatctagtaaatagttgttaagatcactaactttactttcaacccattccaagttagcttggttatattgaaattcacttttaatagttgcaaaatcagttttttcaaccttgttcaaaattgatttgaagccatttgtgtatttttgaacaaaactatccattttacttgttatcaaatattactcctaagagttgctcaggttttaaactgccaaagtaatcactaaaatgatcaagttcattgaagagtttttcaaaggttttataatcgtacttctgaccaattagtttttttgttactggggtgatatcaacaacacttaaaaagtccccataaaacttaatatcaacaactgttcctttctctacttgaacattgcactcaaataaaccagcattattaaaataacgcttgtttttaaagttgtattcataagttttaccaaagtttcactcccatgattgaaagtgttcttttgctcttttttcaacctttgctagtgcatctttagttaaaacaattgtttctgctttttcagtaacagtgaaaaaattaatcatctcttctaaaaattttgctgttgttcaatttggtaaatactcctttacattaacaacgcgcttagcaacactgtcaacacccttacttgctatcttggtcttatcaacatttaaatactttgctaacttagaaaagtcagtgtcaaacaataatgttccatggactaataacctgtctttagcgatatattcagctaacccagaaaacttcttgttattaatctcaaggtcattacgaccatgaaatacagcaggtacatttaagctatttaagaacttcaccacatttcttgtagtttgttcataagcattttccatcactttacctgttcttggcaaaataatagaaaaacagatgttaccaaggtcatgaaacaccgctcccccgcctgaaaaacgtctaaacaagttaaccttatcactttccaactcctttaagttaacctcagcataagtattttggtttcttcccaccacaatagtgttagcgttctgccaaaagtagatgaccttaactaactcattttttctaaattcagttagcaatcactcctctaaagctgcattaaaatacggattgaaaacaggggaagtaataatgaaagtttgcatcaactaccaattaactaaagtaatcaaagatcgcttttttacaaacatcagttaccatttcattcatggtaggatggggtgagatagaattggcaatatcaaacacagtgaggttgttttccatcaccaaagcaagctcagcgataatatcactagcagtgctagcaataatacatccacctaagatagcaccagttttaggattaaacatcatcttgacaaacccattggtttcatgatctgcaattgctttaccactataaataaatggcaaggaagatttgacataatcaatcttttctttttgcaattccatctcactataacctacaaaagcaacttcaggatttgtgtaaatacaagcaggacacttgtttttttcagcaggctttacctggttttggttcaaaatttgatcaacagcatatctgccctgttggtaagcgtagtgtgccaacatcatttgcgtgttaacatcacctattagatagatgtttgtagttgatgtttgtagtttttcatttaaaacaattttgttgttatggtcacgttttaaatcaagttgatctaaacactctgtgttagcaattcttcctatagaaactaagattttatcaccaattacagactgttcaactccattaactgtgtaaaacagttggttgttttcagctctaacaacatgagcattggtaataatctgaactcctttgttttttaaggttttacttatcagttcagaaacatcactatcacaaacctccaaaatcctatcaacaccttggataatggtcacttcactccctaatgaagcaaataaaaaagcaaactcaaccccaatcacacctcccccaactacaacaaacttcttaggtactccctctaaagccaaagcttgggttgagtcaatgataaacccagcttgttgtgctttttcaaaccctggtaaagttaagtatcttggtcttgatccggttgcaacaataatgttgttagtggtgtaagttgtgttgtttacttgcaccttgtttttatctataacagtagcttcaccttcaatactttctaccttagcacccttaataattgtttttacccctgcaactaatttatcaactacttcctgtttttgttttaacagttgttttcaatcaagtttagcttgaccattaatagtgataccataatctttggcatgaactaaataatcaataatctttgctctttttaacaacgttttagttgggatacacccaacatttaaacacaccccaccaaagtattgcttttcaatcactagggttttaagtttatgtttgccagcatactccgcagcaatataaccagcagggccagcacccaaaataattagatcataatccataaattaagctactgtaagatcaattaattcctcaatttgttttgcaatctccttaccaaacctaccaacatccgccccatcaacccagcggtggtctgcagctattgttaaaggtaagatggtatgaactgcaattccattttccactttaacaatgcgttcttctaaattaccagtagcaacaatacacatctcagggtacttaataataggtgtacctacagctgctcctaatgaaccgaagttagtaactgaaatagtacctttattcaaatcagtcaacttaatcttttttgttctagctttgttagctaaatcaacaattgcttgggcaatttcaaccacagatttggtttgggcttgcttaatgttagggacaattaaaccttcttcagtatcaacagcaattcctacattaatgtcatcatttaaaacaatttcgttttgatcaggatcataactagcgttaaaaacagggaacttcttaagcgcattaacaattgctttaacaaagaaagcaaagtaagaaattttcatggaatacttacttaaagcataaccattaacactttcacgatattgttttaacttggttgcattaacataaaaagttaatacagtggttgggataattgcgtgcgactttgtcattgcttctgcaatcgctttacgcattgttgagatagcaatggttttctgttcagttttactttctggtttttgggttgtttctacagtaatgttagtactacttgcaactttagtgtctttaacagctggagttgcatgaggttttactccaaagataggaaagaggttatcagaaaccttaatttcccctactactgaagcccccgcttcttttaccttagctacttcttcagttggttgaggttttggttcaacaagtggtgtactagtcttttcaccaataactgccatcacctgaccaatgctaacaacatcaccaactttaacattaatagcactaattgtacctgcaaaaggagaaggtagttcagttgtaactttatcagtttcaacaacaaataaagcttcatctatcttgatctgatcaccaacttgttttaagatttcagttacttttccttcatgtaaaccctcaccaacatcagtgaatttaaactcatttgccatatcgtattgatagtacttaaagtttaaatttaatagtagtgatctataacaaataaaaaaagccagtttagttactggctttttagttgttagacaaaaattttgtcttactttttacagcagctgttgcacttagcgcattcgcacttgcattggcagcatttcttgttgtcttccatcactttaatttatgaaatgaggtacctagctctaaaaaataaagctaggtaactatattttaaaaaagtgttattttaaaagttgattaactgcatcaataacccgtgcattaatttcaaactggtatttttcacctctagctaaaggcacaacaatatcaaacccagttacccgttgtggggcttttttgagataagtgaatagttcttcagttactgaagtgataatctctgcacttgtagtgaaacttttcaccgcttcagtcactacaagtagtcttcctgttttcttcactgagttaaatactgtttgtttatctcaaggggagatagtacgcaagtcaattaactcaattcccttatctttcaattccccgctgtaaactaagttaattaaatcaaacattgtaggaccatagctaactattgtaagttcactaccttcactaatcaagttggcttcaccaatagggacagtgtaataatcactaggaatctcctgacgaaaagcacgataaagcttctttggttcaaaaaagataacaggatcaggtgattcaatagcagctagaaaaagtcctttggtatcataaggatttgatggcatcactgttttaagcccagcaatctgtgcataaattgcttccaatgtttcactgtggtgttccaatgctttaatccccccacccattggcatcctcactactagtggagcggtatatacaccacgagaacggtttctaatcctagcagcatggacaaagatttgaaacatagctgggaatgaaaagcctgaaaactggatctctacaataggtttaagaccacctatagcagccccaaccccaataccagccatagagttttctgctataggacaatcccataccctttcactcccatacttttgttgtaagcctttagttgcacggaacacacccccttcaaaaccagcgtcctggccatagagtacaacgttttgatctctttccagtgcaagatccattgcgttgtttaacgcttcaatgttatttacttggatttttgacatagttatctttttttaaattagtctttaaagtatttttttgcaatctgtttctgttcaactagttcaggggttaattcttgatagttgtaatcaaacacctcatctactgatacaggagtatctagtaccatcttttcataagcagcttggatttcctgttcaattttgctgaacatctcttcttcttgagcttggttaagaattgatctatcaaacaagaagtttcgcaaccgcttcactggatcactcttcattccctcctcctcttcttgtttggttctgtagatagaagggtcatctgaagtggtgtgaggaccttgccggtagctgaagaactcaattaagactggtccattaccacctctagcgtaattagcagcatcttgcatcgcttcataactagcaattagatcattaccatcaacccttacccttgggatcccacatgctattgctttaacgcttagatcactaacagcagattcaagtttagttcttgttgagatagcaaactgattgttgttaatacaaaaaacagtgtttcacttgtggatgcttgcaatgttcatcgcttcataaaattccccttcagctgtacctccatcaccaatcatagtaacagcaacattaggttgctttttatagtgcaacatgtaacctaatccagcagcatgggaatactgagcaccaatggtgatgttaataggtaaagttttgtatttagcatctatctgactacctttttcattaccatttcagtagagtaaaagttgttctggttttaccccacgatacaacattaaagccccactacgaaacgtaggacaaacccaatcattttcatttaaacctaatcccattccaacctgtaaagcttcctctcccaaattaggagcgaagtttaacatcttaccagcacgctgtcaaactaacatctttttgtccatcattctactcaagttcattaagtaataagcgtgttttaactgttcatcagttagggtaattttgtggttaggatcaattaatttaccctcattatcataaacctgataaagggtagttggaactttatttttaatcaagattgccatatatttctatgctaatttaaaactaagctattttttaggaatgtaatagctaaaaccaagtgcttgtaaaacagttgctaacacaaagttaaacggtttgttgtaatgtggaagaaaataaacatccactaaacccagttcagttagtaacatctgcttttggattgcaagtgcaatatagaaaataatctcactgtgattggtattccaagaaaggagttgtgctcctaaaattcttagggttttcttgtcatatacaagtttaaaacgcaccttgtcataactgcccataaactcaggacgatcattgtcatcaacaactgatatgccaacatcaaaacctaacttcttagcacgctgttcagttaatccacatgctgctaaatttaaaccaaagatatggagtgcattggtgccaacgatagattggagtttaacttggttactaccaatgatatgcatcgcagctactaatccactctttactgcattggtagcaagatcgatgttttcatactgttcactagcagcattgtaaatagcagcacaacccccaatgacataaacatccttatgatttagtgcttggagaaattcattaactttaattgaaccgttgtgaataaactcaaagttttgatctttaggaacaaacttagtgctaggtctaaacccaattgattggttcacaaggtctgcatttactattcccttatcagtttcaactcctttgacaacgttgtttgtactatcaacaacaaagcccttaacactgcaacccatcattagttttaacccatctttttgcatcactttttcaagttcatcagtaaactcatgatcaaagttattaccagcaggcttatcaagtaagtcaattactgttacttgctttttgcataaccaagctgcttcagcaagttccaagccaatgtaaccagaaccaacaatagcaactgatttaatggttttatctttacgaaaactatcgattaaggtaagtgcatgttggtataacttacagctaattaagttcttaacattaccacaatatttgtcagtgtagttaaactccaaaggcttgtgtgtcaccttgttttcaacattcatacatataggtcatgctcctgaagcgattactagttgatcaaactgatcagtgaactctttatttgatgttaaatctctaactgttacctgttttttgattagatcaatgttagtaacatcatgactcataaagatgttagcgcccatctgtttcaactcctcagggttggaatagaaaagatcatcagtgtttttaacaacaccactaacagcaagtgcaattccacaccccagaaacgagatgtttgtgtttctatcataagcgttaaccttaaagtccttactttttgaaagtaaagttctaataaaactagtaccagcgtgatttattccaatcacaatcacttttttcatatatcttagctgcagtaattttttaagctatttaaggataatttgtgcagtagtgattcgatcttttaaaattaagcttttgctagtaatgtaataaaatcttgctaaccacatttggttgtaacttagctttaccattgagttttttcagctcaattaaaaagcaatatcccacagtttcaccatttaactgtttaagtaattggtcaatagcagcaactgttccagcagtggcaagtacatcatcaacaataacacaccttttagcattattagcttggattaatgaagtggttgacatctccaatacagcatgttttctgtactccaaatcatagctagcactaattaattgccctgggagtttattggcttttctaaccaatactaacgggagttgggttttagaagctaatgctcccccaaagataaaacccctcgcttcaggacatactatcgcttctgcattaatagctttaataaactgtgccatttgggttagcacaaaattaaatagttggggattggaaaatactggggtaatgtcataaaacaatgtaccttggttgggaaaattttcaaagcgcttgattgcttgatcaagcaacttaaagttttgatccataaatatcttttttttaaaaactgttaattcctgcaattaactgctcttcaatctgatcaatctctttaaaaggatgttttttgtgttttaagctcaaacgggaatgaacatagttgaaaggactgagtcaaccattgattaaaccaaagcaaaacattggtaaaaaagcagttgcaacatcaaataaaccaacaatagcaattagataaaagatcacaaggttaaagttgccatcaatcccaccaaagttaaaaccactgtagataataaaaatgaaaactaagctagaactttcaatcagatctatcttccactgcgagttgaagttatcgttaaataagtttttgataaataccttgtcctttaagctccttttaaaccagtaaaagtaagtccaagttgttgtttgtgataccttagctgcaaaaaagagccaaaacagataaacaaaggtaattaactggattgttgattggtctatactaaacagatagttagttagatacatcactgcaaacaaaccactacataacaagataaagctaaccaaataacttaaacaataagcaacaccatatctaatcaaacaataagctaagtacagtaaactaactattcctatcccagcaataatcccgttacttgattcaacatctgctgctaaaaattctcctaacaggttaggttgaacaagatataaaactagcattacaactcctatagctaacaagattagccatacaaacaaaaacttccagttgtttttcaaaaagaaatcatgttggtttttggttataaaaaagtctgtgttcaagtcactagttgaacttaaaagtgaatagttactagaagttttagttagtgcttttgcatccttctgatagagaaaaagctttcagtttgcacctgattctgaactgacaaacagtgagattaaaacgatgctgattccataactaaaaaagtaagaagtaatggctgatattgccatcaaattagctagttgttggacctgataattagaaagatagataacaactaaagcactaattaaccaggtaatgtgaaactcaagattagcaaaaaagcttctttttaaacacagttttcacgattcgataatagaagcattatttctaatatttcttaagaataactctcctaaattcaagagattaattaggttgatggcaataacaaagaagatgcccacaaaagaaaagacatcaacaactccaccaactgcactaaagataaccagtgatgacaccacacttaaccctaaagctaatgctttgtataaccctaagagcttgtatcgtagtgttaatagaacagcagcaataagaacgatgataccaaacgcaataaaactagaagcaaaattagaaacatctgtgatggtatttgcaagtggagcgttaaccagacttgtttttgcagttgcaatggtagctgctgtgggaaatggatttgttaaaagctctttaacagtagctgctgttacaaagtttggtggggtgtatgtaccatcactactcaagaaattaccaacttgaaacttaatattaccaccatattctatccgttggttgttagtgtctaaaaagctttgtagagtaggattaatcttaacaggatcaccggttttgctaaccggatcttcagttctaatttcactgataatatagttatggaataaccctgaaaaaccactgctatctgcactccttaactttcttgtatcagcactatttgaaactgtaattacatctgaactattgttgttattgttattattctggttattattgtcattactgttgctagcaaccgctgaaaagtggttaggagcagcgtagatataataaaggtttttgagagtaatgtcacttgcttttttaataggagatgccccattagcatcagtgtttaaaaacagattatcaccactagcaaagctaccctttgcatgtaaaaattcccagagactcttctctctttcattaaaggtgagataatcactactaccctcaactacattaaagatattacggacatagtttaatgcgccttgtttatcttttcacaatactaaagttttattaccactacttgaagttccattcgcattttgcttaaaaaatttaccattgccctcaacactagcttgcccattaccagtattataatcagaacttgataagtttttagagttgataaaatcaagaaaatcggtgtgtaaactttctttggtaactacatttttatttaacttgtattcaaaggttaaagcactgtttacagaagtgttttggggaacaactgccctaatggaagcattaataaaattattatccagtgaatcaaataaaaccactccatcagttgtttcaagtgaaagttggtagttgtgttcaactgaactaattgcatttcttctaacctgagcatcaacttgtctttttctttggcgggttttggcttgctcacggttttgttcaaaggtgagagtaacagaaggtaatcccccattaaccaatcaggacttgtcaatgttgtcaagttcactagcagttttatcattagtgtttttagtaatgtttacagaagaaaagccctgaatgaataaactgttagcataacttttttcaacaccatctaaaaagctatcaatgttagtgatgttttcaatcccgttggttggttttgtttgctgaggatctaatgaggtattgttagttgacttatggtttaaaaagtaaacagttgtagtggtagaaccgttgaaaacagcacctaacctgctgtcatttaacagtttgtaactcccaaaaataacaccaaacaaacccagacaaacaagtccaagaatagttcctatttttaggattcagtccaaagaaaagcgctttttgaacctcactaactatttttaataacttaaattttatataaatattaagtaatggcaaccattcaggaaatcgagtgtgattttttagctaaaatagcacaaaaatttactaatgcagagattgaattaattaacaaagcattctatcacgctaaaacttggcatgaaaaccagaaacggcttagcggtgaacctttttttatccatcctttaagaacggcattatcactagttgaatggaacatggatcctatcactatttgtgctggtttgttacatgacatcattgaagatacagaccaaaccgaagctaatatagcaatgatttttagcaaagaaattgctgagcttgtcactaaggttacaaagattaccaatgaatctaaaaagcaacgtcatctcaaaaataaaaaggagaatcttaacttaaaaagctttgttaacattgcaatcaattctcaacaagagataaatgtaatggtactaaaactagcagatcgacttgataacatcgcttccattgagtttctccccattgaaaagcaaaaggtaattgcaaaagaaactttagaactttatgcaaagattgctgggaggattgggatgtatcctgttaaaacaaaattagcagatctttcatttaaggtgttggatttaaaaaactatgataacaccctgtcaaagattaacaagcaaaaggtcttttatgacaatgagtgggataacttcaaacaacaattaaaaaaaatcttagcgcaaaatcagatagaataccaacttgaaagtcggattaaaggcatttactctacatataaaaaactaactgttcatgaacagaacatcagtaagatccatgatctttttgctatccgcttaattactaaatcagaacttgattgttatcacatccttggtttaattcaccttaattttttaattgacagtaaatacttcaaagactatattgcctcacctaaacaaaacctttaccaatcaattcataccactgttcgtttaaaagggttaaatgttgagatccaaattagaacccaacagatggacaatgttagtaagtttggcttagctagtcactggatctacaaagaacagaaagagggattgttagcacctgctttgcaacttaattacctagtgacaaaacaaaaacactcacatgattttctaaaaaggatttttgggactgatattatcaagattaatgttagtgctagtcatgaacctaatgtaattaagcaaattaatgttgatagcaacaataaactccttgatattgcttttgaaaactatcccaagcaatttgctaaattaaccaaaattgaaattgatggggttgagatcaattcttttgatactagtgttgaaaatgagatgctgattgaattttactttggcaagaataacaatttgaaatcaaagtgaattaggtatatgaataaccctatataccgtgaaaaggtaaaaaagagcttggctaaactagctaaatctggtagatacagtgagttagctttttatgaaaaagaactgggtgaaaaacagttaaaacttgctagtgaaactgaaatccaaaaacgcttaaacaccctaagaattaaaaaaatgagtgattacttagcgttaattgagtgtactaactttactaatgatgaacatttgttgtttctagctaaaaacaacgacaagtgaaataaactaacaaaaccacttaagtttgctttttcaaaagtagtttttcacaactcttactttgaacaaattgaaggtatttttatcaccaaaatagtgattgaaccatgttgtagtaagatccctgatatgcctgaacaagtaactggtatcttaactaaaaacattttaagtgttcaccgttatggttgtaagaatttacaaaataaaaagcagttaaaaattatcccgttatattgaaatatccagcagttaaaactaaaaccacgtaagtttcgcagttacattaacattaacggagtgtggagtgaaaaaaccattaataaaatctgtcaaacaattattaatggtgatggttatattgaaaaaataattcccaagatcaacaaacaaaaagatgaatttgatttaaacatcaccctttttgttaataactaccaacaacttctcaccttaatggaccaaattaccactaagaatatcagctttagttgaaaatacctttagttaccaaacaccgcatcatacacttcttcatctcttaaaagtaaaactaagtgcttttttagtagccgttgtggattgaaacgtgatactctcactccataaactttctttgtaaataaaattaataaaaaaccagaaacaaaaaatgccccaataattgagattcctgtatagaaaaggatttgggaaacttcagttaaataccgcttaaaatcatcattttggtttggatttgggaacttttctagcatttgatcaacaaagctagttatgttatttaatgtgtgtttaatttgggtaaaagcagcattactatcaaagttattaatttttttcaatgaaccttcaagtgcatttaaagaactatctaatcctgatgcaaatgaattgttttgcgttaattttcgcccttcgtttaaagatttttcaacttctgaaagtgttttaactaggttattttggaagatattttgggagatctttttaatttcagtgttatattcactaatcttgttatatccctctttatagtagttgttaataggttcacggtaagtaaaagcaaaataaccagcagtagcaattccacctaacaataaaatccctaccaaaataataagaaaaactgcaagtttttttaatagtctaatcatggtctaatgctgttatcacttcctcttccaaatcaggataacgatctaagatatcattaacatgatcagctaactgttcagtactaataaatcttgaaaacctgatcaatcctctttttttagaagttaaaaaggaaaagacaatggttgtaatcaaaattgctaacatcccacctgatacagcaacaatggttatcattgtgacatcataataattattgaactgttcagaagaagggatgttgtttttgatcttttcatagctactaacaatgctttgtgcttgtgtagaaaactcactaactgcactaattacaccatcagctgttgcttgtttttttacagatggagatgaactagcagtaccatttttatcaagattatttttaaagttgtctaattgtgttttactgttttccaagtcttttttggttgcatcaagttccctaatcttttcttgactaatattacctagattgttctgactctctaagttctttttgtattcatccactttttgtaaagattgctctaagtcttttttaacttgatctaaattgttagtaatggaacttttgctaaattggttagcactatttgctaaagcattagcaaaggctttagcagaattgaaagaactatcaatggaattacgagcttgaacataaaggttagctgctgtactacgaaaatacaaagcagtaataccaaaccctaacagaaatacaaaaaccaacattccaaagaaaagcaagatggttttcgaaaaccgattaataaaaataaccatttaaatacttgtacttttaaccaaactaatggttataaaagtgttttgaaaacaaaactactagagtttaagtttaacacccaatgcgttggttttaagttcttttgctagtgatttaacttcatttgtatcactggaaacaccagtaatatcaactgtttcaaacttttcttcaccaattacagtaaccaacccttcaactgctttagtcattctttcaagactactatctgtatcattttctagtttttggaactgtacactgtatttaccactagcagtaattcttttgatgttttcatcaaatgttactccgttttgttcagcacgttttaagatttcattttgaaactcgctgtctctgcttgcgcgttcattttcatagatgctagcaccagggtaatagttttcattaaccctgtaataggtgttatctccttctctgtaagcttcttctaagtggaggttaagttcttttaaagaacggtacaccaaatcatcatcactatccttgttggtattaacattcttaactaagtacttgtcaatgtatcccccagcaaaataaccttggaactgtctttcaaaccttctgtagttgtaaatatcaccaactgcttgtttgagcttattagcatcaatggctgaattatcactgttttggagtgtaacttgggttaaatcaatgtgggtaaatggttttgaggcaaacagatcatagataacattagttttacttcccaatactaatgggttaaaaccaaaactatttgctttactggtggaataaaattccaactcaactacgtttgcaaagatttgtttagctacattaacaccagtgtaatcaccataaagtgaaacttttttaactgattctggtaattgcaattcattaagttgtgaaccattaccacttaaacctctaataattaggtaagtaggtttttctgaatctattgttgtttttaaagcactgatatctttagcatcaattgcgagtgttttaacatcttcaaagaagtggtttgggtatgagtcataaagtggtgaacctttagcagcaaaataagttcacttatcataagtaaggttattactagttgaaacagttgttgcttttgtgttactccatccgctgaaactaggaacttgtctaaacacatcatcataaccacggttgtttgccatgagagtaccgttagttgtttgcaagattggcatcaacacgcggttattgaaatattcagttgattggtaatagctaagcagtgaaccatcactagcaacatgatcataataaccagctttaaaactaggagtaataaagttatcacctgttttaattaagccactaatttcagttttaggaacaggacggtctaaaccctttggactgttagtgatcgcttctgataactcattagcaaagtttctaaatttctcacggaagttagcaccaccagataaatcaatctcactctgatagctaccatcgtttaaagaaagtgatttcaactttacttctgcactaggagattgtgttgagaacaacttaaaaccgaggttaccactcctacctgatgcaaccaaagcataaccactttgattaactaggttagtgatcataactgctgagaatgtggttaacgctccagcacctaaaacaccaatagtccaaaataatttacgcttaaatttcacactatttttatgttttttaaattgcattattttttgtattattagaaacttttaatttgtaaacagtagtctacttatcaattttaaattaaatccactagtaaacttcaataaccctttctctgaaagagcttggtaatttattaaacaaataaaaaacacccttaaattgctttaaggatgtaatgagtttaaatctttaatttttggagcgagtaatcggaatcgaaccgacacgatcagcttggaaggctgatgttctaccattaaactatactcgcacaaatttggtgcccaaagccggacttgaaccggcacaccattactggcgtgggatcttaaatcccatgcgtctaccattccgccacttgggctggtgacccacccgaggatcgaactcgggaccctttgattaaaagtcaaatgctctaccgctgagctagtgagtctttttgatagggagttaaccctatctttagaaatttaagctttaactggctgggatggatgggatcgaaccatcgcatgatagagtcaaagtctattgccttaccgcttggctacatcccaaaaatggtggacagggagagattcgaactcccgaaaccataaaggtgtctgatctacagtcagaagcgtttagccacttcgctacctgtccattactaccagcaagatattttacaaattatctgttgctgatcttcaggattttaacacgatagggaacttcaataccaacaacatcacattcatcaccaattaaacgcccatagattgcaagggcaaggggtgattcattggaaattttgtgttcttcaggatttgcttcaagtgtacctacaattgtgtatttttcgttcgatttagaactgtaatcatagatctcaacagtgctccctaagctaacttttgttactttggtttttgcttggtggtcactaattaacttagcgttggctaatatatcttgaatttcagcaatcctagtttcaatctcaccttgctgtgctttagctgcatcataatcagcattttcacttaaatcaccctgatcacgtgcttcttgtaagagtctgataatctcaggacgtttaacttggattaggttttcaagttctttttccagttgcttaaatccttcttgagttaggtaatttttatttagttccatgacaaaattaaaagcagcaaaaacacttttattatttaattatttcccctttttttgccaatttttgctaaaaaaatagaaaatcagtattgcagtaatatagatattaaatagtaaatttctatttaacttcgaaataataaactcaagatcaacagaagattgtgagttttaatacagatgagagaaaacaatagtaatgctcaaaacaaaaagaagatccgctttttagctttgggcatcattattctaatcgtactaattgctttaattactatgctttttatcactggagtaattagtcgcaaccgttaagattactttttgctagatgacaaaaaaaacacaagatctcactagttggtatgaccaactgctagttaaagcaaagttaatttgtcatggtgaagttaaaggtacagtttgttttttaaataacagttgaggcttatggatggaaatccaacagctttacaatgatgcaattgcaaataaaaatcaattgtctgcaattgctctaactaaattccaaccaactactagtttttgttatcaagtattccaagtacaactccctaccctttctttttacagtgaatatcaaaaggaaaaaacccatatcaaaggttttaatcctgagctttttttaattaatcaagttggtcaaaaacaactcaatgatcctttggttttacgacctactagtgagattgctttttgcaacttatggaaaaaacaagagttatcttaccatgatctacctttaatttataaccagtgaactcaggtttttcgtgcagaaaaaaacaccagaccttttttgagaaacagtgagttttactgacaagaaactcatgggctttttgtggatcagagccaatctgaacaagctgctattagcttttgaaatttatatcaggatttaattattaacaaactttgtatccctgcttttgttggtttgaaaagtgaaagtgaaaaatttgcaggtgctaaaaacacatggacaatagaagcaattatgcctgatggacaaagtttacaatgtgccactagccatgatttaggtgacacttttacaaagagttttactatcagctatcagagtaaaactaaccaaaaaatgactccaagtagttttagttgtgggatgtcaactaggatcttaggagcaatttttttaacccacagcgatgattatggtttggttttaccttggtatctagcaagtaaacaagtcaagttatacctgtttgataaaaacaataaccctaaaacaagagctttagcttttttagtgaaggattttttagaaaaactcaaaattcgctttagttttatagaaattaacaatcaactaggtaaacaacttttaaaaggagaaatagaaggtattccattacagatgattgttgataatgaaaaaactattaacatcttcaaccgcttaacacgtttaaaaaccagcttaacatttgcaaatctccaaactgaatttgttaatttagttaacaactaccatacagagatgtatagaaaagcaaatgatttagttgaacaaaaactagcaagagtacaaactttaaaggaaattgaacaagcattcaaaaataaaaaggctgttttatgtaccgtgaagttaactggtgaacttgaacaacacttaaagacaaaataccaagttagtgttaggtgtgtttttaaaaagtcagatgtaacacaaaactgtccttttacaaatcaaccttgttttgattcagttttaattgcacgtgcttactaacaaagtactgtcaatcactacccaataaaacccttgattatttggttttatttaatttatttctaaatattttttaccagtaatttttgtttaaaaacaaactcgttttgtaaaagaaaaaagttagagttgttgtatttcaataacgattatttagcctctaaaatcgattagacgatcttctgatcgtttaagatttattcaaattcaacatgactttatgacttttacaaacaaagaaaaaaattgcaaacaaagcaaatcattagcagcgttgatgacaaaatttaagcgctcgcaattaatcttgaaacaccaagctaataacatagcactggagttgtgaaatgaaaatgatattaacctatcaaaacagcttattgagttaatagaagatactttttcaatgcttaaaaaagaaactgttgattttatctatgacatctatatttatggcaaaaagccgtgtgatattggttattctaattccacctattacaaaaaactaaacaaagcagctaatagtttttttgaccattttgtttgagattcgtcaatattagacaaaaggatcataactaatggcagcaattctcaacgtacaacgaattcaaaataaccaagtcactgagtacacaatgagtccagtgcgtaattttgcaaacacaaaagatgtatattttgatgcgcaattaacaaatatagaaagcaaaattgatagtagtagggctcaaattcaccttactattgcactaaaatacaacactaatctccctgataatatctttcaagcccacttcagtttaggcaattgacaaagtgataagattcaacttcaaaaagctcctgataaaaaacacgatagtttaaacagcattaaatatttttatgcatttctagatgtaccccgttcagcactagcaaaaaaagaaattaataggtttagtaatgtggttgctagagtattgagaataagttttcgcttgcaagatcaatctgaaaaagggaattgaagtgactatcatttgtttgatactgtagctagtgaattgtatgcaacagtaattaaagaaacaatcaactttggcaacatgattaagattaatgcacttgatggtagtaaacagctaactagtagccaaggaagttttaaatacagttgaacaatgtatgactataggaatttagaacaacttgatgaggtgagaaacttgatcaatatcagttttgacaaaccagttcaaatagtaaatgttgatgtcaaaattcactatgttccaactaaaggtaggttacaagagataaaacaacaaggtgagtttgaaaataaccttgatgttaatgaaaagcttaaactcaatttaataggcaattgaaattttgacaaacataacaagaagctaatcagtgatatttcaggtactggaatctttttaccccagggtggttatggaagttatgaaataatgattggcgctacagtaggtaatgatttctacacaattatagccaacaaccagtttaagtacgaaacacctttagatgatcttgaacaaaatgacttttttgaggtaaattatttacctgtttacagtacatacaactttagtgatttaactcagtaagtatgattttttcaattagtaaacgaaagttaatttgcggatttttgctagttattttaacaataggtggggttttgggtggtgtttatttagttactaaaaacaacaaggataactaccaaaatgaaagtaatttcaacaatcaagaacaaattagtaaaatccctaatttcaaagctattggtcctgaaacacaacgtatcttaagagaaagaaactatcctttagatgatagtggttattatgtttataagtatggtgaaattaataggtatctaagaaatgaaagtgaactagatgaattaattaactatagagtgatggtaccttcacttaaattacatcacaaaagggttaattttgataaggcatttcttgaaagtaaattaagaaaatggattatcaaagcaattaagcaacataactatttccaacactttgaaaatgaaccaaatttaagagttcaatataacatgaatattccagcacaaaaaattgatgttaatgctgtttgatcttataaaaaagataatgatgctgctactggtaagccaatccgatattgagatcaatttgagcttaaacttaaataataaatctttataatttttactagatttactaatgcaaacgcatgaaattcttttaaaaattaaagaaattgctaaatcaaaaaactttaatcttaatttagatgaaaagacaataaatcaaccacttcgtgagttgaaaatcgattcacttgatatgtttagtattgttgttagtctagaaaatgaatttgggattagttttgatgatgaaaagttaatgaatctaaaaaatcttgctgacttggttttagaagttaaaaaccttttagcaaaaaaaggggtatagttcaaaggtagaacatctgtcttcaaaatagagtgttgtgggttcgagtcctgctacccctgccataaaatataaaagcttagtaagtttttactaagcttttttcaatccccccattcccccaacctctattttgtgttactagtgcctaaggtggtattggagtatcacaacctgaataaccaagtagtcaaagagagtttggaagtggaagcaactgattcttttgatcccacccaaaggttgcaaaaagatagtccaatgaaggatacaggaaagatgggggagaaactccaagagaccatgtcatcaatgagtggtggtggggctacatctcctcgcaaagccctcaccattgaggtggaaagggggagtcaaagtgattcacttttaaaaaacgactttgccaaaaagccactgaaacataagaacagtagtggggaggtgaagttggatgcgagtggggagtttactgaggcctgaaaaccattgttgactactgatcaaatagcaagagagaaggggatgggggcgacttagactttctcccctgaatcggcaacaacaaacccttctccaactcccacactgcttccctttcttcttcttcttcttccccactccccactttttctaacatcaatgtcggggttaaatcaatgatcactcatctcaacaaagaaaacacccggtgggtgtttacccctaactcttcaccagacatttgaacgggagcaggttatagaaaagctaataacaacaataacggcatctccttgacaagtgtgttgcctagtagcaatagtagtcaacagtttaatcccaattcagatgataataaagtcactcaaggtggtggctccccagccaaaaaaacaaccacctattcctttttacccaattccatcagtcccaccagtgactggatcaacgcattgacttttactaacaaaaataacccgcagcgcaatcaactgttgctcagaagcttactaggaactatcccggtattgatcaataagagtggaacgggagatgagtttacccatacgagtgagcagaaatgggataaaacgaatgaaaaagatgggaatttacctgggtttggggaggtgaatggtggtttttatcaactaaataaaaaacttattagcttatttttattaggtttttacttatttaatagttaaaaaagttttgaatttttcttagttttttatttgtttaatagttaaaaaacactaggctttacctttatttaattaataaaacctttacccctattaccaaaccatccataacaccaacttgtttgtgttgttcaagtctagggatgtaaaagttaagtatgacagttcaagtggctcaaataaccagattagttttgattcaactagtcaagctaacaaacccgcctacatcgttgaatttactaattccaccaacattggcatcaagtgaagggtagtgaaaaaatatcagttagatgtaccgaatgtttctagcaacatgaacgaagtactgaaaaatttaattcttgaacaacctttgactaagtataccttaaacagtagtttggctaaagagaagggtaaaacgcaaagggaggtgcatctgggtagtgggcaagcaaatcagtgacgatcgatgcgtaatcaacatggcctaaacaacaatcccagtcccaatgcatcaaccggatttaaactcactaccggcaacgcatatagaaaattaaatgagtcctgaccaatttatcaaccaattgatgggaccaagcagggcaaagggaaggatagtagtgggtggagttcaacagaagcaacaacggcaaaaaatgatgcgcccagtgtttctggagggggatcagacaccacttcaaaatttaaaagttacctcaacaccaagcaagcgttagagagcatcggcatcttgtttgatggggatggaatgaggaatgtggttacccagctctattatgcttctactagcaagctagcagtcaccaacaaccacattgtcgtgatgggtaacagctttctacccagcttgtggtactgggtggtggagcggagtgcaacaactgattcatcatcaaaacccacctggtttgctaataccaatttaaactgaggggaagataaacaaaaacaatttgttgagaaccagttggggtataaggaaactaccagtaccaattcccacaacttccattccaaatctttcacccaacctgcatatctgatcagtggcattgacagtgtcaatgatcagttgatcttcagtggctttaaagcggggagtgtggggtatgatagtagtagtagtagtagtagtagtagtagtaccaaagaccaagcacttgcttgatcaacaacaactagcttagatagtaaaacggggtatagggatctagtgaccaacgacacggggctaaatggtccgatcaatgggagtttttcaatccaagacaccttcagctttgttgttccttattcggggaatcatacaaattcaagtggttcatcaggaaccattaaaacggcttatccggtgaaaaacacagaaaaatcaactgtcaagatcaattctttgatcaacgctacgccgttgaatagttatggggatgaggggattggggttagaaatatttttatgagtttaaaacaaggtaatgcagataactagctaaatcaacaactggaggttttgtagccccatttcttaaatccaaattatgtaagttttgctgtttaagtaaatccataaatttaccatcttgaacttttatctgttcttttacgtgtaaagtgaaaagtagttgattgtctttaaattgaaatagagaacctggataatcagtattttgaactaagttataatccaaatcaccatcaactatgaacttgacatccatttcaccatttcatgatgaagggataccagaaaaaggtgcaaatcaactaaataacccagttaatttgtatccaccttggtactttatgtcaatttcaaatttaaatttgtatggataatgttgcctaaattcaattccattattttttcaatcaatggttggattattttccttgttttcaatttttatgcttgttaagtttagttttatgtcagtataggaagttagctttcctcttaatcagtcagacatataaagaccttcaagcccttgtctaggaaactgaattcctttttcactaaaggctttctttgcattttcactttcatcttttttattatttttgtaataatctgacgttgctttagtaaagctattaattaaaagtgaaaaagttttatttttatcagcagcaaaagaagtttttagagcatctattagttgagtcttatcagtaacatctttcttttgattttttcaataatctttaaattctttagcattttcaaatgatttattaaattgttcttgttgttcttttaagcgcttagcttcctcttcttttcgcttaagttcttcttcttgttttcttctttcctcagctaaaattcgttgttgttcttcataatcagctttagctttttcacgttcttttttgaatggttcaattatttctttttcaaattttgttttagctaaatctagttgttcatcaatttttaaaactgaattaaagatatttgtattggaaagaaaaagtgaatcacttacagcagttttagctattgaagtgagatcattttgatttttatcaacaagtttattaattagaggttttcaaaacaattgggtatttagatcgttaccattaaagctattttgcaactcttgtaaattcaaaaaattagaagtttgggcttttaaatcaaattgcaagttaacagtgttgttaccaccttcataatcaacttcaaaatccattttgatttcaaagctataacgaatcttatctttaataacaatgtcatttttttaaccaattcaagattaaagtcttttaattgaattttctttaagttgtattgattaaatatttcaacaatactttcggtaatgtttaaaccttttggatgcaattgtggaaagaaattttcattaaggaatttaaaaaaattctgtggaactttaggcaatttatcttcatcattaattggaaaaattttgttagtttcattaatgcttgattacagcctatttaataaatcaactgtttttttaatacctgatttaaaaccacttaaaagatgaaaaatatctataacattaaagttcctaggataaaattcattcttaaatttctcttgaaataagtcaaagtttttatcataatctttctctttagcaatatagttttcttcttgctctgttatagctgtttgctgttggagtagaatactattttctctactatttgttgtacttgattttcttagactaggttgacttaaatttgcagctgagccattatagatagaagggacaataagtacaccagcagttaaagttgatgcaaaagagacaaagagaaaagttttaattttaaaacgagattttttgatagctttcaaagttaataattaatattgaaaataattagctaaaactaaaaaagttacaaacgaaattgaatttgtttaaaactaaaacagacagggaaaatttaacattatattctaactctgaatagcaaaaaatataagaatagctttaattcaaaaaagtaattcggatcttaaaaaatattttttaataaagattaattgccagcaacttgaatctaagtaataaagtgaatatttatttttattaaaaacttatattcaaatttgtagtctatttttaactaatataaaaaagttgaatatttaaaaacaattaattttgataattaataatccaggattaataagtgcttttcaaaaaatttacttgggtcattccaagtttgtttttaacaattatttcaacatctttacttattagttgtgcaactaaaagcgataacaccttaatatttaatatttcacttgatcataacgctgatacatcaatagaaaaattctttactgttttttcaaaaaaacttagtggaaaattgaataaaaaaattaatgttaactttaatatagttgatgattcctttacaaaaattaacaatattcaagctaataaagcagattttgcttttgttaattcacaagctattgcttcaaataattggtttggctatacgccattgatacaaactttaacaacagcttttaaagaagatttggagcttgattattatgaagatggtaatttacaaaaaaaagctgaaaaaacgaatttgctttttctaagtccaccttacaaagaatgagatgatatcaaacaaaaatgaactggaaatcgttatgactttctttatgaaccttcgaagttagtttctttttacagatcaatgattttaataactggttcagctagtgaaattacagctattaaaaaagcgtgaaatgaaaaaaactgaaatcagtttatgaaatttggaattggtcatggacaaacaaattcagcttcacgttttgagctacctgatcttttatttagaaaacattttgctaaaaattatcccggattacaaaatgcaattaattctgatcccgataaatttgccgtagttagaggaagagagataggtataaataaaaacatcaagattgtttttgatgatgctaattcattttcttgaacacaaaatattaaaggttcaaaaagacctttttacactccaattgatcctaacgatagattagaaattctcacttatagtgatccgcttttgtatgacattggtattgttagcaacaatttatcaaggatatatcaaaaagctattggtgaaatttttattgagttagcacaatcaagtgaagatctatatgggccttcaattggttataacggctataaaatgattaatgattttgagaaagaagttgttgaaataattgaaaaaacctatggaaaataaaccaattctttcttttgaaaaagtatcaataatatacaaaaaagctccacttttgcaaaacattagttttaaagtaatggcaaaggaaaatgtttgcttattaggtaagtctggagttggaaaatcgagccttttaaacagtgttactaatacaaaaatagttaaaagtgggttagtttattttgatggtgttgcttcaaacaaaaaggaatacaaaaaactgaaaaaacagtgcagttatctggatcaaataccaaatttaattgacactgattatgtatatgaagcaattttaagatctgctaaacaaaaattaacttgattacaaaaattaatttgttttgaacctaaatgaattaaagataagatcttagcaatactaaaagaagttaatcttaatgattatgttagttgtattattaaagatctttctgctggacaaaaacaaagagttgaaattgctaagcttttttttaaatcaccaaagctacttttagttgatgaaccaaccacaggattagatcctttaaccgcttctaaaataatggatttaattactgattttgtgaaaagagaaaaaataactttggtttttgtaacacatgatatagatttagcactgaaatatagcaccagaattatagcacttaaaaatcatgctttagtgttagatagattaacagaaaaactaacaaaagaacaactttataaaatttatgataactaagttgttttttcaccaagttggcgataataaaaaacgcttaatttggtattgaaaactattaataataattgctgttttggctattgtcatttacagttgaatagataacttttctagctttaatcagtttggtttaaatgtttttattaataacattacaagcttatttacccccaatcttaaccacgaatatacactagtaagattcctagcacaaactgctttttttgttacaggaggtagctttttaggatttatttttgcgatcctattttcctattgaactgcatttaaaattcaacccttttacattgctctaccgatcaggttaataactatagttttaagagcatttcccgtacttttatttggttttttatttagtaatttatttaataaacaactagcagctacactaacgattagctggtttagctttttatggaatacaaaatacattactacattttttgaaaacagcaatttaaagtatttttttaacaaaaaaattagagaaggaagtggttttaaagctttttgaactactatttttcttagtgaaaatgagcgactatggttgttttttctttatagtttagaagcaaattttcgttgaactacgcttctaagtatatttggcattggtggcataggacaactaattgttgatcctttaagtataagggtgcagtttgatcttgtattaattccattagttgttttaataacctttctaatttttatagaagttgttgtttttttattatcaagttttgtttttgagaaaaatagtgaagatttaagaccaattttaaaaacaacagttattgaaaaacgaaagtgaaaaagaattatatttattttgtttattgtagtactaattagtcttagtttagccaatttagtgactattgattacagaattaacgatgctgaatttttacaagatttttttaaccagttttttcagttaaaaagtaatcttttttcaagtaatgatcctaatataaacccaattttaatgttagttaaacttacaactcaagctattagtttaattagcttggttgtaatcttttctattctctttggttttatatcatgtaatttatttaaaaagagattttcaattagttttaagatcttattactttttgttagagtagttcctagtattctgttgtttaggctactagatcctttatttctagaagcaaaaacaactattattttagtcttactaattaatcatggttcaagttatggccaattgatgtcaattaactttaataaggcaaatcaaaatatcatcaataactataaaaatcatggtatgacaaaaggttttattttatgaaactatttgttagttgaaaataaacctaatttaataaacattaccagtgatgcttatgatagtgtaattagggatttaattttgtttggtagttttggcggttcaattattggtagtagaattactaatttttttgaaagagctcaatttgataatctaggttctgttacaatcccattaatggtttatctaattgcaatagaaataattttcctttcagttagattaactagaatttcagtttttaagaactacctttactaatgatagttttgaaagaagcgctctaatattaaaactgcagctaatgtatctttagcctttttaaaatccttatgttttaaatccattgttataagcttatctttaacagcacttgtagtattactttcatcaaccaaaattattggcaaattaaaacgtttttctaaaagttgtttaaatgatttaattgccttttgaatatcagaataatagtgaaatttgggaaaacctatcactattttttcaagttcatacccatcgtttttaattcgcaaaaataagttgttaacagcagttttgaaattattttttacttcaaaaacatgaaatgcagaaggatatttatctagtgtattggcaattgctgtacctatttttttcaagccaaaatcaattgctaatatatatttcactatttattttgaaacaattcattaagcttttgaggggtaacattatcctgaaaagaacctctaaataacttatcattgcctccgccctttaaattaaaactatttcttaatttttcaataatggtggtagttttatttcctataacaataaatgaattactttcattgaattgattaattatcaagaaatttttagtttgattttgattgaaaacatcatgtagtgtttgtagcaatagtttaggttctacgtcattaaaagtggcaattacataacttttattttcatctactaaggataataattgctttttaattgataaagctaaagcttgctgtgatactttatagttttttgtttttaactggttaatatcattttttaaagctaataaagtatcagatgcatctcttaattgggtaattttttcaggtaagataaatttatctagcctttgttgcaattcttttaactcaactttaaaaattgaactatcaatcaaagatagaactttttcaagttctgattttaattggattaatttttgattttctgcttttaaatagttgttaatagtttcattactgctaatgatttcaatccttcatcttccagctcctaaagaatagaaatcagtaataaaacaatcttcaattgaagcagtgttagctacatgagtgccaccacacaactcaacactataatcaccaaagcggatcactcttaatatttcatgttgagaatattcctcttcaaaataagcaattgcatttagtttttgactcccttcaaaatcagtaaaaatctcttttgagcttattttttgtttaatcaaagagcgaattttattttctactttctcaagttcatttcttgttaaatgacgattcaaattaaagtcaatagttgctttttgcgcagatttaaaagcaccactttgtttaataagtggatcaatttctttttgtaaagctgcatgtaaaaggtgttctaaactatggttgttagcagcaagttttcttcaagtttcatcatgtgataaagttacttgatcattgagtttaaaactacctactaaaaagtagtggaagtgttgtttattaggtcctttaaatacaccttgaaaactgattttttgatcattattattagaatgattaatgcaacttccttcatcatatctctgtcctccagaagtagcatataaaactgtttggtcaaaaactacataaccactttgattattaagttctttaactggtaaataattttcatcaaaaagaccaattaccttagcattaattttatttttgtgataaaaaaaagtacttttagttttgaaattaactaaattaatattttgtttttcaaaatttatagtttggttattttgcttagagatagaacgatgtttggccattaactgatcaaatactgttcaatcaatagttaaacctttttgattaactagttctcttattatttcaacaggaaaaccgtatgtttcgttcaattgaaatgttaattggggagttagagtattgtttttaacacttttttcaaacagcactaaacctaaatcaatcgttttattaaatgcattaatctcttttaaaactacctgtttaacagtttcatttttagcttttaaatgttgataataattctcatatgaagcgatgatttcatctattatcttttcaataaatgctaagtttaattgcaatttcttacaagctattaaagcacgtcttaaaagtcttcttactacataatttctctcattaggaccaggtaaaactccttctgaaatggtaaaagtgattgctttaaagtgatcagcaataatccgaaaataactctgttctttcactttttgaggatcgaatgtaaagtaagagttgggatcatatttaaatggacaaaaagcttcaattattttgattagctttaaaaagatgtcagtatcaaaattggttggactattttgtaatactgaaacaagtctttctattccagcacctgtatcaatatttttttgagcaagttctgtatagttgccattaccatcattattaaattgactaaaaacaatgtttcatatctcaacataacgatcattttcaatgtcctcaaagaaaagtttttcaccaatttttttaggatcaaatttctcaccacgatcataatagatttcagtgcaaggtccacaaggtcctaaacctaagtctcaaaagttacgacttttgtcacacttaataatgtgatttttatcaattttatgcttaattcatcttttataagtagtttcatcatcttcataaacagtgatataaaaacgcttaggatctagctgataataattaactaaaagatcaaaagcaaaatcaattgcttctgttttaaaataatcaccgattgaaaaatttccaagcatctcaaacaaagtttgatgtcttgaagtaaaacccacattttcaatatcatttacccttaaacatatctgtgcattaacaaggcgtttagatggtggtgtttttctagcactgaaataatcttttaaagtagcaactcctgaattgattcataataatgatgggtcgttgatcggaattagtgattttgaagctaaaaccagatggtctttctttgcaaaataatctaatcaggtttgccttactttatcagttgttcaattcattgcttaattttaaatgcaatttaccagtgataaaaataactatagttcttttatttgctaatttatttttatttcaaactttttgttagcaatttgtgcataaacatgattatcagctaagaactgctgaaacttattttgactgtttactgttcataaatttaaaggtaagttaagttttttgatcatttggggatacttttcatatattttggttcatgggtggaggaattgacaaatcttttggattctagctgtactaattgtttcaaactgttttttagtccaaaataaaaaaccttttttgtaactattatctaaatcataaactttttgcaaagattcaaagttaaaggatgaaaacaagatcttatctattgcttttttaccataacctttaactaggtcaacaagcttcttttcaattcctaaatatggtttttgatcagttttaatctcaatattgattaacttaaatttatctaaataaagatctaagaactcttttaaagttaggatcgattgaaattgaattttaaggtgaaaaaaagcactatgatcatctctttttaaactaactaatgattcaaactcaacctccttattaactaatgcggttctcaatgttgtctcatcatgaatgataactaactgttcatctttagttaaatgaacatcaagctctattccatcaaaacaatattcaaaagctaaatcaaatgctagtttggtgttttctggagcaatgaatgaataacccctatgtgctaaaagcaattgcttgttatgcattatcaagatctcttcaacggtatgaagctttatttaatcgtttaatttccatgctatttgagataaaaacaattgatccacatatcaaaccaaacaaagcaatggataaacaaatagcagcgataatttgataaccagtgttactagtattactttgtcctgcaactgtatatttcttaccaacttcagcagtcacagtgtaaagtcatccatcagtagaaaaaccaataaaactaagtaaaccaacactagatgcatagttatttttaccaatatcaatttcacctatttggttatatctgactgtaaccattccccatgataagataccagtaaagatatagagaatggaagagaaagtaattaaagtgatgttagcagaatttgtttgtacaaaaccaagtagaataaatgctagaacaaatacaataccaagaacagtacatatcattaaaaacaagatatagcttttacacttatctgctaatctacaaagataaacactaacagcacttctcagtgcataagttctaattcccccaattacagttactaatactacaggcgctaaaaatgcattttgcaacatctgtaaaaggtaataagcaaaagtgctttgaaacacatacatccccattaaaaagaaggatagtaaccataactttcagttttttaaggtcactaaaatctggtttaaattgcgtttaaaacttactaaagtggtttgactttgtttttcaattggtttttccttaacaaaaaacaaaactgtaaatccagtaattactagcattatggcaatgataaaagcgtatgcagcaaatggttttgaatcagcattctcactacctcctgatggatagaaaatgctggtaattatcaatgcaattagaaagataaatattaaacctcatattccattagcagctccctgaattccaaaaccaagtgcttggttttcttttgttgcttgttgactagctagttttcataatggtgttcaaaagattaaagtacttgttatccctcataaccctcatattacacaatactgaataaataaagcatcatggctttgttggtttttagttaagatgttggctgctaatcaaaaagtaattgctccagtagtaattgctgatagaaataacaattttctagaactgaagcgatttgttaaaaaccctcctggtagttgagtggcaagtgttacataaccaatgatagaagtaacagtagcaacttcatcctctgtaattcctaagtacaagtggaggttaggaacaacattcttaacataatagggtgcagcaattacaaatacatcaattgctcccaaaataattaaggcaagaatttgttgttttgaaaaatcctttaagcgttttttaaatcctttttttgttgtcactatcactaatgataaagtgggataaattaaatatacatctaataataaaagtggatggaagtgaaacgttcttcacttacttttaaaaagaaaaataatgtttactagaaaaactattttttcttaaattaatcctgctcctaaacaaatttgatcaagtgtatataatacaccaaactgtccagatgcaacacttataacaggatttttaaatgttatttccagtttattatctgataataatttcaactttgcaatttctggtttttgagcatgtctaattcttaccagaacttgactaggaagttgctttggtgtatacaaccagttaaattgatccaataaaattgttgttttcaataattcttctttgtcacaagaaacaaataattcattagtttcaatatccttagcaacaacaaaatgacgttgttttaacccccctaaatttaatccactgcgttgaccaatcgtataaaaccaaacaccatcatgttcactaatagtttgtttggtttttcaatccttaattaatcctttttttacaggtaaatagttttttaaaaaatcactgaaatgtctttcaccaataaaacaaattccagttgaatcttttttatctgcaacttctcaattattttctctagcaatatttctcactgttattttttttaaatctgctaaaggaaaaataacattctgaaattgttcttttttaacatttgctaaaaaataagtttgatctttattggtatctttaggaatagaaagcaaaggctgattttctatcatgtttattttggcataatgaccagttgcaaaaagagaattagggttaatttgcttacaaaaatcatgcaataaaccaaacttaataaaacgattacaccagatgtctggatttggggttaacccttttttgaaactttgaatcataggtaaaaaaactttgtttcaataagcttcaattaagtttttttttattaacttaattcctaaagaattagcgatttttttagcctgttggaagtcttgaaaagatgaacaacctgatttgttattatttattttcttatgaccataaaaatcattattaagtgtctcatcccaacattccataaaaacaccaataacttcttggtattgcttttttaaaagtaaagcactaacagcagaatcaacaccaccgcttaaacctataaaaactgtttttgcaataattgacatttttaataaacagcgtgaatagcaaacctgtttactaatctttggtgaaatctattaggattaatgccttttgtaatagcaagtgcagaaataaacactattaatgcttcataaaaattttgacagcactgttgatcactatctttaggattttctacaacttttgctagataatctagctgtttaattacttcagtttggataaaaaaaccatcacttaacattggtttgaaaaaaaatggttggtcatcataatcatcatcttcataaataacaatattgtcttgttctcgttttaaacacaaattaaagttaatgcgaaaagtctcaaaatcaaccgcttgaaattcagtttgtaaaaattttttaaaagctataagttgtggtttcattacaccagtctaaaaagttttaacacttcttgttcaagatagcaatccttaaacagtttatttcagtattacttaaataaactactaaccaaaatactgtaaaaggtttaatttaaaaactaattttctttattatctaagtttaagttattaagtaaacctaaaacatatttttccagatcaaagatagctaaatcactagttttttcaccaaaacctatcagtttaacaggcaggttaaacatatctttaatagctaaaataattccacccttagcagaaccatccattttagttaaaacaatccctgttagtttggaaaattcattaaatacctttgcttgtgatagtcctgtttgacctactgtaccatctaaaactaaaagtgtttcactaggttcacttccacttaccttttgaataatttgataaattttttgcaattcattcattaagttaagcttgttttgcaatcttcctgatgtatcacataaaacaaagtcatatttatcatcaatccctttctttacgccacgaaagataacagctggagtttgttctttagggtttggaagtacaatgtcacagtttaacagctttgctcactgattaagttgttcaatggctcctgctctaaaagtatcacctgcaacaagtagaacacgtttattttgttttatgaaaaaatccgctatcttagctaaagtagttgttttaccaactccattaacaccaacaaagagataaacatttgtaaagttaggtttaactattaaatcagtatcaaagagtttatcttggatgtaataaacaataatttggtcaataattagctctttaatgagctgaaaatctgtaattctgtttagcttgatctgttcaataatagcatcacaaattttgtttgcagcatgataaccaacatcaagcaaaactagcccttcaaatagattttctttaaactgttcgtcaacattaacatatcgttttgacagttcattaatagttttagcgaaagttgtagcagattttttcaaaccctgatagtaagttttattattggtttgaaaaaggctttgtttttcaacttcttctttaagctgtttagcaactgatttttttggttttagtttggcaattaacttgcttaaaaagcccattattagttaattagaatcattttcagatacatatttttcagcattttcaagttcaactgcaaaggttttagttacacctttagtttgcattgcagcacccaataacatgtcacatttcatcattgtaccttgacgatgggtaataattaaaaattgggtgtttttgctagcagttttaatgatgttagcaaagcgctccacattagcaggatcaagtgcactttccgcttcatctaaaataacaagtggaaaagcacttactttcaaaatactaaataaaacagaaagtgcaactaaagttttttccccgcctgataacaacattaagttggcaatatttttaccaggaggatttgcaaagacatctatccctgaaaccaatacattactaggatcagtgtaacgaatttggcaagaaccaccaccaaatagatatttgaaagtttttggcaactcttgatttaatttttggatcagttgatcaaactcattgctagcaatttcatcaatttcagtaatagctttttgcaaattttcaactgcttgttgagctgattcatattcagcgttaatatcatcaaagcgcttttgcttttcacttatctcagcaattgattccatgttaattacccccatttcattcaattgattttgtagtttagcaatcttgttatgggcttgcatagaagagagtttaactggtttgttgtgattagcaatagcaaactccattgtcattttgtaaacactgttaatcttttcagtgatattttggattgtattttcaaacctaatttttccttcccgcgctgaaactaatttagcacgttgttcatctaacaatgccctaagatcaactatcttctcttcactttgtttaattgtttttgctagttgtaacttaagttcttgattaagctttaacttagagttaatttcatcacgtttagctcaagcactatttaatgaatggattaattcagcttcactagcaacagcttttttaccatcaaaagttgtgttagtaagttgttcatattccattttgagctctaaaataatttttttaatttgaacaatacgctctataaacttggcttgtaacaactcttcatacttgagttttctgttcatttcatctagctttacttctagttctgtaagctccttttttaactctcgttcgttgttttctagtttgttaatgttctgttcattatcaagtgaagctgatgataaatacccatcactaagatttgttttttcaaatccaccattgataattccccctgcataaactgtctcaccatctaaagtaacgatcctatataacttgtaagtatagttagaaaggttaatggcactatttaaatctttagcaataataacttgtgctaaaagagtatttacaactggttgaaacaatggatcacacttaacatgatcactacaaacaccaagaaaaccatcaagctgctttaaaatttccatgtgttcgtttgtgattttagtatcactagcaacatcatctaaaggtaaaaaagttactttacctatctcatttttgactaaaaaatctattgcttggatggcagcattattgttgttaacaactaggtaaccaattgattttccaagtgcttttaagatagctttttcatactgcttatcaaatttaagaaatgttcctagtgtatttaaaattcctgttaaagcattagcatttttaactaagatattggcattgttagtttttttaagctcattagtttggagttcaataattgtttttaaggaacgttggtaaattaaatcagcagtatttttttcaatctgtaactttatctgatcaacaagtgatttttgttcgttaattagtttttcaagatcagtgatggttgttttggaatttgatagttggttttcaaaaccatcaagctgggtttgatcaactaaaattagtttttttaaagctgcagctttttgcttttcatctttttgtgaaaaaccttgtcttaactgcacatcaataatgactttacgttgttccaattcattgatcttttggtaaatatcttgtaactctttttgcaattcattagattgcatatcagcactatgaaagcgactattaaagataacaatctgttcttctaacaactctagttggggttcgtgtattttaaagtcatgttcactactgttaatctgaaaattaaacttatcaagttcagtttgtgcttggagatattccccaaccaaaacagcaagttccaactctttcaattcgtttttaaccctaatgaattgttgtgctttttcagcttgtaatgtaagcttttttaaatcttttttcagttcatttaaaacaacgctaacttgttttaagttaattaaggttcgatttaactggttaacaacttcttctttacgcttggtatatctaccaattcccgacgcatcttcaaagatctttctgcgttcttctggcttagcttctacaaatcaagagacactcccttgtgaaataattccaagtgaacctttttcaagaccaatatcagcaaaaataccgctaatttcttttaaagttgctggattggagttaataaaatattcactctggccactccctctataaaccctacgcatcacgcttatctcttttcttgaatcatgtaataaacggttggaattatcaaaggttagctctatttcagctaacttactagcaggtttgtctttagagccaaaaaagatcatatcatcacctgatttactacggagatgtttcatacttctctcccctaaaacccactttaatgcatcaacaacattggatttgcccgatccattaggaccaacaataccagtcattgaatgggtaaaatcaattgtgatttcatcagcatatgatttaaaaccatatgcgcgaaaacgttttagaaaaaccatttgttctaaaaagctttaatttggatgttgttattagattatactagttgaagtaaactaaactaggctaattattaggttactaaaaaataagctaataacgcttcatttaaaaaagcttctatgttttaatagtaactagtttatttaatttaaaaattacattaattgcttttagaaaagcaatatcatttaaaagtttttatttaattgcttgagcggcagtgataattccaacattaaaaatgtcactgacactagctccccttgaaagatcattcactggacttgaaagtccaagaacaataggaccaattgcatcataccctccaagtctttgggcgattttataagcaatgttaccagcatctaaattaggaaaaacatagatattagcactattttttcaagttagttgaggtgctttttgtaacctaaccttttcaacaaaagcagcatcaaactggagctcaccacaaacactttgatgcaattcagggtgtttttctaaaaatagtttagttgctaaaacaactttatccaccatttcacccttaccactgccaagcgttgaatagcttaaaaaagccatttttatctcatcctcatttaaacttttggcaaaattgaaggtgttttcagcaattgttgctaactcttgggagttaggataaacagcaaaagcacaatcagtgaagtacaaacgttcttcacctttttccatgatgaaaacactagaaacaaaattaccagttgctagtaactgtaaagctggtcttaaagtatcttttgtagcatattctttaccacaaacctcaccatcaacaacctttagagcaactaaggtagcagctaaagaactaggatcacgtacaaacttttgtgcttcttttaaatccatccccttatgcttacgtttttcatagacaaagttagcatagctagttaaatccatctcatcaatcacataatgagttatttttttatcaaaatttgcagggatttcctgacgattatgaaagataactgcaggttggatcagcttagattcattaagcatttcaactgcttttaaaacacttgctgatcaaccttctggaaagataattacaggttttttactaacagcttgtaatcgttttttaaaaatatcaataacactcattgttttattaatttggtttaagaatttttttgaatatcgctaatacctactaactcttccccaccaattagtgctaaagaagcaccaccaccagtggagataaaactaaactgatcagatagttgcatttgcttaactgctgcagctgaatccccaccaccaataacgctaaaagcagttttatttttagcaataatctcaccgatttttgaagttcctttagcaaagttagtaaattcaaaaactccaaggggaccgtttcaaaagatagttttggctgtttttaaataactttcaaataaagcaattgttttagatccaacatctagagacatataggattgatattgttcttgaattttgtcactaacatctaaagtaatgccagtttgatctttaaattcagaacccattacctgatcaattgccagcacaatcttattatgagtatctttatccaagatttgcttagcaacatcaattaactctttttcaactagggaattagcagtagctttgccttttgctttaagaaaggtatttaccatccctccgccaattaagatattatcagcaagttttagtaagttttcaactacctttagtttatctgatactttcgcaccacccaaaacaacaacaaagggtttttgtgggctttgaattaggtaagagaggttctttagttctttttccattaaaaacccaatacaggattttgcaacatactttgcaattcctgcattagaagcatgttttctatgggcagtaccaaatgcatcattaacaaaaatttcccctaaactagcccagaatttcgctagttcaggatcatttttactttctaatttaacaatttctcctttatcgtttacatcacaatagcgagtgttttcaaggagaaggatttcaccgaatgctaatgcttgcactttttgtttaacttcagcaccagtgtttttacaagaaaattgaacctttacagttggtaagagttgttggagtaattcagcaaccggctttaaagattttttgttgtttagtttatcttctaaactcttaatccttgaaaggtgtgatagtagcactatcttgcagttctttttaactaagaacttaatagtatccaaaccagctaaaattctttcactatcactaataaccccattgatcattgggacattaaaatcacttcttaaaacaacggttttgttttgaaaatcaattgcttggagtgttttgaaattaagcatattagagcttagcacaatagctaactactctcactagttggtgtacataggaagattcattatcataccatgcatacaccttataaagtttcatgccatcaacttcaacaatattggttagtttagaatcgaaaattgaaccatattcagaacttaccacatcgctagatacaataggatcttcacaatatttaaaagaagcggaagcaaatcgcttcatggcttgatttacttgttcaacagatggacttttttcaagtacaacacttaactctacaatagaaccagttaacactggaacacggagtgacatcccattaagtttgccatttgcttctggaacaacaagcccaattgctttagctgctcctgttgttgttggcacaatgttaacagctgcagcacgagcacgacgtaagtcattatgaggagcatcttgtaagcgttgatctgcagtatatgcatgaactgttagcatcgttccataaacaatcccaaagttcttttcaagtacatgaactaatggtgctaaacagttagtagtacagctagctgctgagatgatcttatcatcgctactaatggttttgtgattaacattgtaaacaactgtcctgatagttttttctttagcgggtgcggaaataattactcttttagcacctgcttttaaatggagagaagcaccctcttcacttacaaacctaccagttgattcaattactacatcaatatcatgttcatcccaaggtaaattttggggatctttttcactaaaaacataaaccttttttctatcaatttgcaagatgttttgtttaacagtaatctttcttttcaattcaccatgagctgaatcatatttcaacaggtgcgctaaaacttcaggttgggtcaaatcattaattgctacaacttcaacatttgccttactgagaagagaacgaaaaacaagtcttccaattcttccaaaaccattgattgcaaccttaatggttctattctttgctgccatactttaatttaataattagattttaatactttagcctattgcaattaattctatctgtcaaaaatacagcaaattattgctattaattgctcttaaaaaaataaagttttgcttatcaaaattgaaactataattaggattttctcagtaaactaaattccagttattagcaattaataaaatactaaataaaagtaaacccactaataaaaataccccgtttaataagttgtattttaaaggataatgagttctgttagtgttatttaaatcataacctttagcttgtagagcaaacgctgttgtttctgtttttttaactgttgaaagtaatacgggaataaaaagggttttaatcttgaaaggatttaaaaacgaacacttgttatagataaaacctctagtagcttgagcttgtttaattcttataatttcacttttaacagttgggagtaatttaaatataactgcaagcaagatactaattggttgaaccttaatatgaaataacttaagaaacttaaaaaacctctcaactgctcaagccaattcatagatagaacttgaagttgtcagtaaaaaagaagcactgaaaagcatactaatccttaatgcaattacaaaggatcgtaaaaatgaacgtagattaaaacttcaccagctaacaccaccaaaattattaccacctgaatagataaaacttcctaaaaaattatggttctgatcaacgcttaaagcagtatttggtaaaaagataaaaccgttaacaattacattaaaccacaagaaaaataacatccaactcaaaataattaatgcacttttaacccttttctcactaattacaactagggttaaaaaaactaagttaataattacaagaccatataatcctagcggtagaaaagcaacaactaaactaattagtcaaaaccacaattttagaagtgggtcaattttgtttaaaaaactggttttttgcatgaaaataagttttttagttcactaataagatcatcaaggtttttaatttctgcttggtttttaaaagctattcccttttcattaaacatcttaactgcttggataattactggaggggtgattccatattgcatcaaccaactggtgtttgaaaaaaaatcattaacagtggtttgatgaattatctttccctggtggagatggatgattttatcagcagtttcaaagataaaatcaacatcatggctaacaataacaatccttgttgtttgtttcattgctactagcattttgcttaagttgctaatcgccatttgatctaacccaacagtaggttcatcaaggattaaaaacttaacttgcattgctaacacactagctaatgccaaacgcttcttctgtccatcgcttaattcaatgggattttttattaacgggatgttttccaatccacatagatcaaggtattttttggcataattaacatcttttttatgacaaagtttaaggttcactgctcctgttaaaacttcttctaaaatagaatcacaaaaaaactgatcttctgctttttgcaaaatataaccaattttttgcttaaagttttttgttatcttttgttggtattggtttgcaaaataacaataattagcacaatttatatagccaaaactaggtttttcaaataaacctaactgttttattagtgtagttttaccactaccactttcaccaaaaataactgtaattttattaggttctattacccctgaacaacatttaatgatctgaccatcattatgcttattgacaaagacactaatattgttaaaaaacaatggatcttgttcaatgttcagtaatttgctattaaaaaatggaatgctttttttactgtttaaaaagtaaaaaggattaatgattttatcaacctttttataaaaagaaaacagtttttttgaatctaattttgctagtttaagattcgctttttgagcttgaagatggtatttttgttcaattaaatctagttttatttgaggtgtttgcatatccagttaactacatcattcaattcaaaacttaaacttggtgtttttttgtttatttgtttagccaccttatgggccaataaaagtggaaaagggagattaaagtggtggttatgaaacaaatcaagctgctcatatatcgcttcaggagcaaactttttaattagcgatcctttacttaaaaagataatctcatctgctagaaacagatcattaaaatcatgggtaatattgataactattttgttttgttttttgatggtatcaaacacaaattttttaagtttattgctgatcttattatcaagcatactaaatgcctcatcaagcagataaatttgtggtttgacagccaataaacaagcaaaaacagcacgttgtttttcaccaaatgaaagttttttaagtggtgtaaattgtttatctttcaattcaacaacagttaaaacttcattaataatcttatccatttcactagctaaaactccatggttttccaaagtaaaaatcaattcctggtggagtgtatcagcaagtaattgcacatcagggtcttgtaataagattccaatcttattaaaaccaacagaagtcaactccttatcattgaaaaagatagttccttttttagcttttagaaatccgccaaggagtttaactagggttgatttacctgaaccgttatgacctattactgctaaatgacacccatcttgaacattaaaactaatctgatttaacacattgttttggtgttttgggtatttaaaactgaggtttttaacttgtagcaaactaagcttatttataaattttaaaaataagtcagagctaaaaatctgttttttggtagataaaaaacaaaaaagcagctgttgtgctgctcttttttatttggaatatgttctatatgaacaggttattttgcttgtggaccttgttcaccagttgggttatatttttttgccatctcttctcttcacttcttaaagttttcaatttccactttgagtttggcatagtcattagctttaatagcagcatcaatgttacctgttagcttttctaacttctctttttcttctttagggaaattcttagcatcaggacttgctaatatctctttgatggtattaacaataccttccccttcattacgtaattcaatacgttcacggatgatgttatcccgttccttgttagcttcagcatcacggatcatcttttggatctcctcctcagaaagattaccgttgtcactaatggtaatactgttttccttttgcgtggttaaatccttagctttaacatttaagatcccattggcatccaaactaaaggtaatctcaatttggggtttacctttaggtgctggttgaataccacctaagttaaatcttcctaatgacttattatctctagacattggtctttccccttgacatacaaccacatcaactgattcttggttatcttgagcagttgaaaagatttgacttttacttactgggatagttgtatttctcttaattaaaggagtagccacaccacctaaagtttcaatagaaagggttaatggagttacatctaaaagtaaaacatccttaacatcaccacgtaaaaccccaccttgaatagcagcgccaatagcaacaacttcatcaggattaatagaacggtttggttttttacctggtaccattgattcaactagcttttgaactgcaggcatccttgtagaaccaccaactaaaagaatttcattaatctcttcaggtttaatcttagcttccttgataacatctgaaatagggtttcttgttctttcaagtagtggttttgttaactcctcaaacttagcacgggttagttttaactcaacgttaacaggacctttttgggtaacagttaaaaatggtagagaaataatcgtttcaagttgagcggaaagttcaatcttagcacgttcagctgcttctttaagccgttgcattgccatcttatcttttgataagtttaaaccctggtgttctttggcaatgtaggctgagatatattcaatgatcttgttatcccaatcatcacctcccaaacggttgtccccagcagttgcaagtacttcaaaagtaccttctgcaatgtcaagtaaagatacatcaaaagttccaccacccaagtcataaaccaagactttcatctctcttgatgctttatcaatcccataagctaaagcagcagcagttggttcgttaatgatcctttcaacatttaaaccagcaatcttacctgcggttttagtagcgtttctttccgcatcattaaagtatgcaggaacagtaataactgctcttgaaatctttttaccaatctttttttcagcaaagtccttaagataactaaggatttgcgctgaaacttgttcaggacttaattccttagttgtaccatcagcattttggacttttactttatttgaggtacccatcaacctcttgatggagacaatggtatttgggtttgtaaccatctgtcttttagcagcatcacctactataatttcattgtttttataggaaacaatggaaggtgttgttcttttaccttcaggattttctaatacaacaggtctcccaccttccattacagaaacacaagaattggtagttccaaggtcaatgccaataattaaaccattgtctgcactcatactttttttttagatcaataacaattactcagtaattataaacaaaaattagcactcaaacactaaaagtgctaattaaagtttgttttatttatcttttttagtttctaagctaacagtgttaactgttttcaacggtacattaacggtctttttaaattcccatataacttgaacaattcacacaacaaaacaaatcccagtgaaaatagcaggtagataaacagataaaagtcttcataaaaaaacaccatctttaatctgatcatggaggaattgatcagttggtttgaatgcattgagaaaactagtcatcacaaattgtgttgcaccttccccactagcaactggaataaagttagaagcggtaacagcaatattagtaatgttaaaaagatcaattaagctgtattgatcaataacgttattagttgtgttgacagtttttgtgatcataaaaacaccaaacaaactaaagtaggaaacaattgctacaaccatgttagctagtaatttaaagattgttaaccctcaccttcgcatctcaattccatacaacttattaaattcagctttttctataaaacgttggtagatctgctctttagttaaataaggacgtttaagtcactttcgaaactggtttacaagtgaatagatcaaaacatgcatctttttattgaaagcaataacaataaataagatagcaacaacaacatcaaagatcatcccagtaagacttagtcagtaagagacaaagctattatggttatttgctaacaattgatagtttttagaaagaacaaaaaaagaaggtcaagttattaacgcttgcgatagatttcaaaatgctcctgtagaagtgacaattaaaactgcagtttgttttttcatcccctttttaatgaatcaatacaagcgaaatggatcttgtcctagtgataagggggttacaatttgaaaaaactgtactacaaaaccaaataataaccactctcaccaactagcataaaaacaaaatctccttgatacccaccaattaatgattacattccacaaaactgaaactaaaaaccctaagataacaacaaatatccaaccccaattctgatagttaattgcagtgataatagttttcacatcatcaacactaacacctaaaaaaaagatagtaacaataacactaataacgattagaaaaaccaaaaaaaagctaaaagcaacgatgtttttagtgttaaaaaaggtattggtggttaactttgccattacttaagcaagtttaagcctgattgaattcttttatcaccaatcctaaattggggtttttcaattgcacttaaagcaagttgttgggtgcctgtatcactagcttgaaataaaactaaagctgctactatatcactttcaatattggtagaacttgttaaactaagtgaatcaatgtcacttttagtgaactgaagatagttgtaactatcaccaccaaagttaaattcactaaatttttggttggtttgggtacttctttttgaaatacttggactatttgatgaattaaaataactggaatattggtctaaaacagctaataacaacgcttgtttagctttgaaatctaaagcagaattgttaattgcatcgacctgaaaataagctgaaagtgttttgccattactactactactacttggagttagtctacttagctgtcgggcaatgttatctaaaactaattggtcttttgtttcactaataaattttttaagatcatcctttgaaccatattgttttaaggaattggcagcgatatggtttaaaagtgcctggttagtattgttttctaacatggaactgttagttgtattcaaaccagtaaaaccataagtaccattattacttgttgatactgcttgtctggtgcttaacatcgtagtagcaggtgtagtgttaggacttgttttggttttaaaaaagaaattattaggatcaatagtttggttggcattagctgttgtagcatgttcatcattttcatagttaaaaacagagccaaatattccctgaggattattggtgttgttactgataatattcttatcataagcaatataggcaatttcaccatactttaagttagcttgtaaaatatctttaaagttttttaggttgttttcaattaaccattgcaaagtaaaaatgaagcgataatggtcaataactgctttaaagttaacattaaaacctgattcatcaacactctctaaaaaagcttttttaaacaattcatcaatattgccattattaggattaccatacatggctttattggttaatttgcttcatgtcatgtaatagtaattgctaattactttagctaaactatctgcatcactacttgatgaagttgatgaagatccatttttagatttaatctcttcaaataactttttagctttttcaaactgttgattgctagtaaaagcattttttaacaatgcaaaggaaagagggtttacagttgttacatctaacaacgcatttaaactccaattggcactgttagtaagtgattgatcattgttaatatcaactagaataatgttgctaaagttaggttttgatttttctgtaactttcaattggttaacaaattctgttactttgttatttatgtcgctcagaatttcatctcttatcttatcaacatcagcttttgtagtttttaacttattgttgttttcactaatatttattttttcactacctacttttttccaaagtgttttagtaattaaaaacaagaaatagttattgagtttttcataatgaccagacttgcgaacatatggcaaatgggaagataagccatttaaccaaggggttggattaatttggttaacattggtattaagttcagttgttctacttgttagtttgttatctaatgcatccatttgtaaaaacaaatctctgattacatttgttgctaatgcaactggtgcaaatttttgcattagttctttgtaatcattgaatgctttttgcatcgcatcactacctttatcttttttttgaaaatcagtatttattagtgcgtttactaatattaattcctgatttttttcaaaccaagttttcagtgtttcatttaatggaaaactaaaggaatataaactgtttttaaaggtgtttgttttggcttgaaaagctcttcacattaaaaactgcttttgcttttcaatgtctctttcagttttgctactactattttttgtcagataataactacctccatcaattccaattacagcaactccctctccgtttctaactagtcttagcttcaattggttattagagttatggcttgtattttgaacagtagcatttgcacagtttgcactaacagtgctagcaccattatttgttttgttattaggaatagctgcatcccaaacaagataactgcttgttgttgatgaactagctttagttgaaaccatcatatcacttgtagttgtttggtggatttgctttgctagttttcctaaattggaactatcattagaacttataaaagcatctttaataagactctttaaattgttttgtgaactgtctgttgtattgtgttcacagaacaatgtattactcttagtatggttttcaattttagttgattcaacaacaatggtattgttaagttctttattaagctctttaattgtgggaagttgatctttatcttgatttaaaagatctagttttaaatttaaactagcacctaaattagctgcttctagttgatcaacaatgtttagactatctactatttgcttggtttgagtgttatcagaaagagttgttggaaaatcaatcaggttgccttgattttgatctaagatgtatttttctaaacctgtttttgctgtatttaatccgtcttttccctcaattaactgctctcagcgtttgttgccaacattctggttctgaggaatttccccatctttaggaaagaaaggaaacgcataagaaggggttaatttatcttttagtttttcagtgttgtaaacttgacccaaaccttgttgtggtgctgcatatttaaaagtagcttgactgattaaagtaggatcggtatattcaacccagagattaaagatttgtgcttgtaactttgcaaacaatgcatcattagtttcactaaaacgtggttcttgaaaaccaaagtcctttcatttttcaggttgggatagttcatcatagatataaggaccagttgagagttgtccattaggtttataaactaagaaatccttagcgaataatttagcggtaaaatcactaataagttgattgaaaagttgttgggattttcaactagcctcactgccaccacttttatctaatagatcttgttgaataaatactgctctgtttctgggtggtgatattaacccattaacagtatttttatattgatcatcaacattctttttagtgtcttttaaaaacttgtttatggctttgtcttcattgttttcataccaagcctcaagtgcttttaaaagtggtcctataacaaaatgtttgtttgctgaaggagtttttaaagcagtaataagtccttcttttaaactacccttttgaccatgaaaaaaattagttgaggttggtgaaaaaactgtttgcaaagcactgtttgttggagttgaacaagctacaagtattgtgcttactgacaaaccacaaagtaaaaaccaccagaactttgatttttttaaaagttttttcatgatcttggttttttcttattaattaaaaggttttgaatctgttgtttttggtattttttgtagttaggtttaacctttttatatttagctttgatagctttaattttcttaatttgtaaagttgaaagcggttttttggtagttttttggttattttcagtcaaaaacttcaaatcaccattactagttaaactaacgttttgaaatttaattccttttgctattagtttatttaatttactttgattttggtcatttcaaaaaagatatgatctgccccaactgttaagtcgtgctacacgaccagaacggtggatgtaaaaactatcaattttaggtagatctcaagaaatcaccacactgaaataatttaaatctatcccacgtgaaaatagatcagaaacaactagtaatttcaatttattattagttgcttttgtgaaattatttttacgttcttgataggttaaactaccataaattgaaccaaaactaatattgttatttgaaagcaattgtgttaattgttttaaagatttttgattagaacagaaaacaataatttgctgattttggtggtgttttaataaggctaataaaccagaaaaacggttttcagtattgagatgaacaacaaaatgcttaactaaggggtgaatccattgctttggatggagattaataactttagtattaattacttgttttttaattatttggagttgttgattgaataaagtagcactaaaaaaggcaaacaagggctttgctttttgaaaaagatgaacacattcaagtcactgctggattgaactttgctctaaaaacatgtcaatttcatcaaaaacaacgtatctaactttgctagtaaaaaggtatttttcgtttagtaaactaacaattagttgtgcttttgaactaaatgaagtggcaaaagtaaaggttttaaagtactttttgatttcagttaagatgttgataatttgtcattgtaactctttggttggtacaaaaataactgcttgaggttgatctaaactggtgttaatcttatctaatagaggtaaaagataagcaaaggttttgccactaccagtttcagcaataccaatgatattttggaatggtcataatttaaaaactgcttgctgaattttggtaaattcaacaatgcgtttcttatctaaaaactgcctaatagaagaggaaaattgcatcttaaactagaatttacgcactcactgtgaactgattgctgaaaacaatctgttatcaccaactctaactaagccatttttggcatttgctatcaatgcattaatagcttgggtttgattattaggattaagcgcttcaagcgcaactgtacttaaaaattcttcaagtgaaagatcaagtctttttgaattatttgaatctgtactattcaaactatcactaccaagcatacttacatcttcaaggttaatctgttttgcataaactgcatgatagatctggttatcttgtaaaaagttataactgctataattactggttttatttgtacctatatacccttcaaacctactaaacacatcattaaagttactattattagttttactttgagcttgttttaattgaacagtttgagtattgttaaagtttgaattagcaaaattcttcaaattagttttttgttcttgtaaggattttgatctatcaacaccagtaacgttaatattaaggttacttgttaaatggttataaagtgcatcaaactcagcttgggttgggatgttatcaattgtttctataagttttgttagagaaccaaaactaaataaagcacctttgtaaattgtttcattactaccacttgattgagtagattgtaattgtgcttgaccaccattagaacttgatttttcagattgggaaacaaaacttgtaaagaggcgatttctaactgcatctggtaagttgttggatgaagtgttggtaacaataccatggaaaccaaaccttctttgctggttattggtttgctgtgcacttttttgcattaaagttaatgatgtactgctactaccattgttctttgtatagtaaagacttgaaatatcatttgcagcactgttaactgttggggttttgttgttggttcaattataagcactcgaaccaaatacatagttaggattttgttgttcttgcttggtaaagtcttgattagtttgagaagcaacgttgttagccatttttactaatacagatttagaagaacttacactcattgcttgactagcagtattatttctgtctttatcactagctaaacttcaaaccaagaaactatttgttgttcttgatagtttagcttgcaagtcctgttttaggtttttaaggttatcttttaatagccattgaactgtataaagataagaatagtaattgattaagtcattgctatccaagcgttcttctaagtttaagctgttgtataaactatctaaaaccccattaattttgggtttattatcagttgaactttcattaacaccattaccaaaaatagaaggattagcttgtttttgaaaaagatcaaataggtaggtatatttaaagatatttcagttttcattattgagactgtttcagtttttaaaagttaatttatctaaatcaatcgcttgtttaaactgatcatcattgacaaaataatctcgtctaatggtattttgtaactcatcacttgataaaacagcatttaaagctaaattaagtgctagagaagtgtttctaggatcagatgaaagtttggtatcaacaaggataatttgtgaatattgcggtgagggaattaccgaaacttttagttcatcaacatgctttttaactgctgcttcaactttctttttattctcttttaacttgtcaattatcttttttgaaaaaggatcactactactactattactattactattactattacttgtatttgaactaactttatcaatgatgtctttatagtaaataccaagttcattgtagtgtcctgttttactatcttgttcataaggtaaaacagcagctaaaccgttcatccatatttgtttatttcgctcattatcaatgaaaggttggttacgttctgctagttttaaagcaactttgttttctgcagtagcaacttcattaaaaacaatttgttgatattgactttcaactaaatccttcaactcgtttttaacagtgataatgctatcactaaactttttaaactgagggaaacttaaaaagttactttctttgctgtctactaatttaaaaagggcattaaataaaaataaaactctgttcttatcaaagtgttttttcacttcatcaaacaacttaaagtcataagtagtgtttgtatcaattaagccatatttggtttgtagtgcacggaataataagaattgtttttgtttatttacatcacgtcctgattcagagagataataaccaccaccatcaacacccattagatggataccatctttaccacgtgctaagattaaatcaggttgactattgttatcttttttaagttcttttagatcaacgattgcagaattattactactatcactgttacttgtactagtagcattactgaactttttttgatattcacctttaaaaacatctgttgatttagtagtttcattttctttaaagatcttagctagatctgttttatgaacagtagttgtttgtgaactactacttgcacttttcattgcagccttagctgaattattttcaacaaagaaattttcaatgattgatttatctttttctaatttagtgtattcagtttgttctgcacctttggattttttttgtaaagctaaatagccctggataaaagctgctgaaaagctaggatcaaaggtatcaaacatatcactagcttttaacaacaatttaccaccactatcactagaaaacttattagggatgtcaatggttttattgttagtatttacatagctttgtaaattactagctaggatatgaaaaccatttgctccttttatggagttatcttgttggttatatttgttaaatacttgaaattgataggaaggggttggagatttaattagatcaggattaaaatagttatcaaacccatcattaggagtttcattagtaaatactactcttgaaactaagttagggttttcattagtaacgaactgatctaataatttatcttgaatggcagcataaactgcatcattattgatcctaagtcttttatttttatcaacaaacttagcttgtattttgatattattccaattactttggttttcaattaaaccttttaatggagttgataatacgccaacacttttatcaacatattcaacaaagttctttgtaaaaagcttattgataaaatcatcaacaattttgttgttaacatcacggagctttcagttggcttgatttccaccagtgttatctaaaatatcagtttgtaacctaactaaataatcaccccgatactgatttcttaagttttgttcttgattaacaaaactattgtctgtatcagtattaaaagttcttaaatttctcttaatgtcatcatcaacattttcttcataaaaattgcgcaatactggcgctaggcgcatcgttaaatattgcgttagtccttctctattttcaagtgctttataaagtgtggcattaatactaccatcatttttatcagtaaaagcactactgggtctaaagagattttcaatggttctggagtttggttgtgcacaggcaacagcaacaattcccaaacttacagctatgcttgaaagcagcaatggtcattttactcggtgtaaaaaacgtttcattgcacagtcaaaaatttcaataattttaaaatttatatttttattattaccacatgcgacttgaaatagaaaacgggcttgaatttgtcaatgatcctgtggtaaatgaacttggcaagatctgtttttttcatccttttacaggtaatttaacaaacaaacttagtttcagaagtcatttcaatagatacagtttttatgccattaactacccagggcatggtaatagtgttattaacaatccaaagcaacttgaatttagttactgattggaaattacaaaacagttttttgataaacataacttaaaggatgtaatcttatttggtcattctattggcggtggtttagcagttgctttaactaactatttaagcagtgatcaatataaagcagtcttgttagaagcaccattaaatcctgctattgttgaaactcctttaaatattgttcaaaatctcattcctgatcctgatagtgattttgctgttattcaaaagtgtcttgtttacaatattgagaaaaaacttggggcaaactttaaagaatattgtgaaagagaaaagcaaaaatcaattcaccaaaaccaacgccttaaagtgatgttagaaccttctacactcaaacaaaacatagttttaatcaatgcagcttttttaaagttaaattgtcctgctttgtgaatccatggtaagcaggatggaattattaagtaccttccatccaaggcttattatgaatcattaaacaataagcaaattcaatttaaagccatagaagcagcggctcataccccttactttgaacaaccacaaaagtttttaagtttagttaatgatttctttcaattaataagttaaagcagtttatttaactaaacgcttgtatcactcaacaacgtaagattcatttattccagcaggtagttcgctacgctctgggaatcttatataagtaccttcaaatgcctttttgttggtttccacaaatgatgagataacactgttttcaataaaatttttaactaatggggatttagttattcttgcttttaaacggactttatccccgggattaatgatgattgaaggggtgtcaacagtttgatcatttaaaatcacatgaccgtggtttaccatttgtcttgcactctttcttgttggtgcaaaacccattctgtaaactatgttatccaaacgtgattctaaaactctaaataaattaactgttaagttacctttttgttttaaaacaaagcgaaataacctacgaaattgtttatcagtaataccatacatgtattgcatcctttgtttttcttggagttgttgggcataacctgataaagttgaggaacgaaacctatttccatgttgaccgggaatagatttacgtttttttcctttggaaaactctttgttgttttcaagtaaagaaaaacctaaacgtcttgatcgtttgaaaatactaccagtatatttcatgtgttttcgattttaaattatcttaataatcaaggctaaaatcaccactgctttcaaataagtcttcatctaataatgaactgaaattggaagtacgatcaggaactagtgtttctatatccaaatcattaacactaaaagcactcattgaatccattactttggcatcaatgtcaacaaaatcattgttaaaaccttcaaattcaaaatcgatgttacgatccatgttttcatagataaaatcatctaactgttcattggagatgttatcaaaagtgttggaaaaatctattaaatcatccattaactgattaggttctactaacccattatctgttacactatcaaaattgcttaaaagtaaaggatctttttctttctttgcaaagcggagcgtattatcaagcttattaatgttgttcataatagtttcacaacaagagttataaacagttttaagttgttttaaactaccttgaatgctttctatcttcttttcattttcagtgatagcacgttgaacatgacgcataatttctccagatttttgcagttgttcataactattacttggtttgtaagcaatagcaaaatcactagctaatgatctgatcatttcttctttttgaagtgttgttagattcttagcgttattaaattgaacgttaaggttctcattttgatcaattaaacgggaaagttcactttgtaattcctttttaattattaagtaacgttcactaatttggttcttatagttggtaacaaaatcattgagatggataaatgattgtttaacagacatctgataatcattcatttgaaagattgcatcaaagttaattgtagggtttaattcaccacgtttcaattcactaataatcttgtaaagatctgattttttattgaaattatcaagttcacttttatcttcaaccgattgcttattttgagtaattgagtgttcttcaacaggttcttttgctttgacaaaaacttcaattttaggttgttggtcttcgctattaacagtattgatagttagttgatcatcttttttatcgagtcttactgattcactagtaacaattgattgattatttaagctattaatttgttgcaattggacagataatgtttttgcaagtgttttggaatcttcagttatggaattaatggtaatttgttcttgctgactttctttattatctaaagctaaagtttcaactggtttatattcaatacggttggatacaaaactaataggtaaagttgtagggatttggggtgaactttttttggtagtgatagttatcttattatcagactgaatatcaaatttctgtaaattattagtgtagttactagtttcaactacatcttgtttattgaaactactttctaaaactggctccttagttatttcaggtttgaattgatcgttaacttcgctatttacttgatcaaactgctcaactgttggttgagtttcaaatgaagaagaaaaagttgtttggtcttgttgatctgtatcaattggtaattggtaactatcaactacttgggcttgtttactttcaaaatcagtagttacttctttttcagcagttggttgtatttcctcattattatcaagattagcttgaacttgatcaaatccaacttgataattattttgttcttcagcaactggtttgagctcttcatggtgatcaaagttgtactgaacatgatcatctaaagaaggttggtcaagggttggttgaggtaaatcactgtcaaagctgtagctatcagttgttgattcaggttgttttgcaaaatgatcatctgaagaaggctggtcaacaactgattcaggttgttttacttctggtggtaggtcgttatcaaaaccatagttttcatcagttggttgttttgcaaaataatcatctgaagaaggctggtcaagagttggttttagctcttcattttgataaatgtcgtattgaacttgatcaactggttcagattgactttcaaagtgtgcatcaggtgcagtttcactattaaacttaacaggttcagactctaacgaattattgctgtttgattgagataaatcactcccaaatttatagtcatgaattggttcagatttactttcataatgcacatcatcagatgcagtttcactattactattaagttgaatgaattcagaatttaatgaatcattgttagttgcatctttgttgttttcagagtaaagattagattcagaatttaagtcactagtttcaactacatcttgtttattgaaactactttctaaaactggctccttagttatttcaggtttgaattgatcgttaacttcgctatttacttgatcaaactgctcaactgttggttgagtttcaaatgaagaagaaaaagttgtttggtcttgttgatctgtatcaattggtaattggtaactatcaactacttgggcttgtttactttcaaaatcagtagttacttttttttcagcagttggttgtatttcctcattattatcaagattagcttgaacttgatcaaatccaacttgataattattttgttcttcagcaactggtttgagctcttcatggtgatcaaagttgtactgaacatgatcatctaaagaaggttggtcaagggttggttgaggtaaatcactgtcaaagctgtagctatcagttgttgattcaggttgttttgcaaaatgatcatctgaagaaggttggtcaacaactgattcaggttgttttacttctggtggtaggtcgttatcaaaaccatagttttcatcagttggttgttttgcaaaataatcatctgaagaaggctggtcaacaactgattcaggttgttttacttctggtggtaggtcgttatcaaaaccatagttatcttcaactgattcaggttgttttacttctggtggtaaatcgttatcaaaaccatagttatcttcaactgattcaggttgttttacttctggtggtaaatcactgtcaaaaccatagttttcatcagttggttgagattctttagtggagatccactggtcattttcaaagtaaccagatcaaacccactcaccattttcatcataagaaccatagtcagggttaccaacatactttaaataatcattctcttcttgcttttcatcaaaaacaaacggattcccattttcatcaaagagttgggagatatcatattcagtatctccataaggatcatagtaaacccctgtttctttgttaaaagctatataatagccattaccatcagcatcatatgctaccttaatattagggtcttcttcaacagtggatttaccatcataaagatcaccaaaaatgttttcaggttcggtttgggtatagtttttttcttcaaaaaccgattgcttgtttttagccatcaagaaaagttatttatgccagtttagtcaagcttgattataaaacttatcgcttcgctctaactcttccatgaaagcgtaaatagtaataaataattttttaaattattttccacaatccctattaaagggtaaaacaaagctacatagataggtaataataacgcttgcaccaatactcttggtaaaagaaagaaataaaccccatacaaaacaaagttattacttggtctgccattattaataaaagtaataaactcaatggcagcaattgtccccaaaaggatagaaacaactactgacattaaaaccattagaaccaagctataaatagttaaaagtgcttgttctttatttctcttttttacataaacaaaccctaaaaatccttctgttactaaaaagaaaataacaaagctaactaaagttatgatttgtaaaacaacaacattaacactaagatcagcagtttgaaaattttttgttccaatttgctgaaactcattattagttagataaagtaaaagcagtgttacactaacaacaaaaaaagttactaatagtgtttgtaacacccaaaaatcaaccttgtaattactggcattttttctaactagataaatccctttaactatgccagcaagaaaagcaaagagtggcttttgcaatgcaaacatccaaaaccacacataaccctttgttaaccaatcaatagtatcagataaaaatccaaaaataaaaccccaaataggaccaaagatccatccgaacaatgcaaagggaatccttagaaaactaatgcttaatacattagtaacactaattgaaaagatagaaaagataaaggttagtgctaataaaacactagctcaaactaacagttgtaaactctttaaaagtctcaacggatagtaaggaaacaaaaagtttcaaaacagttttttagattgaagcttgaatgtgaattttaaccaaaaatagtaggtggggggatatctaaagtagttttactttcatcactagtaattggttttgccaattcctcttgaaagtacttattaaatatctcattagtttgttctaagtttaatttaggacttaatgaaaaagcaattacactaatgatgctaaaaggaacaatgctaaaaacaaacaatcaggcgattcctatcagataacttgcaaataatggtgaaacactaattagttggttttcactaaataagcggatgattaaagctgcatttcaaaagccacttcttactatattaccagggatacaatttaaaaagacaaagataaagatagtccaaaagatccattttattcttaccttataacggtagttatcattaattttgggaaactctttgaccccaaattcactacgtaaataccgcattgctctattggtttgacctctagttgcaaagctatagggtttaccctgaaaagcaaagaaaaaagaagcaccaccaaaagccaggaagatcatggtaatcaagttagatgaacttaaagcaaaaaagcggtttagatttgttgtatctgcattactttgctgaacagtattttggtcattattaacattgaaaagtggactgttcttatcaacaaagtgggtaaaaaagacattgaccatcacaacgtatgctatcgaaatgaaaaagatggcaatcatagagatgaaaatcgctagttgtgctcatttaatccactgactcttaaactgaaactcaaagatcttaccaactagtttttcagaggtaaacctaccaaaggcacgatctctggcacgaacttggagggtttgttgcaaaatattattctcaagtcctgagtttagctgttgagaattgtttatagtttgaaaacttgggttatctttaactgttttattgttttcttgtaactcactaacgggtttaacttgagtttcagcaagtttggtaaagctattcaactctttattaaacaagtttttaacagcaacattaagataattagctaaatctaacgcatcagttagatcaaacttagcagctttaagttctttttcacttaattggttttgccctaattggataaacttatcatgaaaactaccaaaaagaaagtggtctggtttttttgttttaactcttttttgtttttcctctaaaaaataaagtaatttgagttgtgccaaaattgttttggcaaaatcactatcagtttttatccttgttcttaaagtttcgttattaaaaacaatgtcaagattattttgtaccttagttagaatttcactaaacgtcattttgataagtaattttagagaggttagttagtaaaaaagcttaaagcaaagttttttaacaacggaatggcaaagccatcattgtgctttaatttaatatccaatttttgaattgcattaattatatttactaaaactttgctagtaaagttatggtactgactttgaatagcaattaagcgaaactgattaacatttagattaatgttagttagttgctttggattacaacttttaaccatcaatgctaataacaactccccactaaaaaattctaaaaattgggtggcaaaatttggttttgtacttgccaattcatcaatatatttaaatgcctttacaatttgtgaatttgttagagctttggttaatttgtaaatttgaacaggttgataatcacaaataactgtttcaactaatttgttatctttgatttcatttttacctaacaagctaagtttgttaatttcttggtaaattacccccatatttaaaggtaaagcattcgctaatcaatcaattatttccaaatcaagttttaagttaagttctctacaaacttcaccaattgctttatgcattgattttcaatccaatttatcacaaaaaacagttgtgattgatttaatggttttaatcccactaaaaggattgtcagtataaacagttaaaactacatcagttgtttttagtttttctaaacacaagttttcttgtctagttaagcttgttttttccaaaaaactgcaattattgacaataaacttttcattattagaaccaaataatggttgtgaaaagagatcataaagttgcttaagatctttaaaccaaatagttttatatggagaattgcttttgatttgacttaatttttggtgaattagcccaatatcttgaccataaattattgtcataataagctactgtaaaaatagtatataaaagtcccaataagccataataaacaaaaaagaaaatcagattaggtttaggtatttgtagaaaaactgttacttttaatgatcattcacttagcattttaagtgggagataaataccaaaactagcttgaccaaaaacaccaataaagggtaaaataattcaactaacacaaaaataaaataaggcaattgggctaaacaaaaggttaaacaagacactaaaagcatttagtcttgaatttaaatacaagcttaaggggctgataacaatcaagattaaactagaactgacaagcggttttaaagcttttaataactttagtttgttgacaaataacaatacaaaacaagctagaaaagaaaaattaaaaccaaagttatttaaagcatggttactaataagaatgattaaaagtgcagttaaacttaagttatcttctggtaactgttttttaaaaacctgttttaacagtgttgagataaaaactcttagtgctgaaaaggcaaatcctactaaaaacaggtaaatcaataaaacagcaaaaccactaagtttgtttaagtaccatctttttcataaaaaccgttccattaaattaaacaagaaacttaagtgaaaaccactgataacaaacaaatggacaatgtttagttttaaagcattttggtacaaattgtttttagtggtttcattaattaaaaatagttttaaatactgatttaactcacctttagtggtctgatcaattcaattaatgaaaggggtacgaataaagttatttttaacaatttgatttatcttgactgctggaacaaaataacaaaaagcaataaaaaaaccaacaattgttaagttcaataaacaaaactttcagtcataccaaagactaaaaagcgttatcaaaatgatccaaattgacagtgcaacaaactgttcttgttgtactaaaaagaagcctgggataaaactgagtaaaacaaaaaaataaaacagctttgtttgcatgctgttttattaatagatttattttgaactttttaacaaattaaaagtccttagatcaatatgatcttgatggataacgtctaagtccatcatagctagaactaaatggtaaactagttcttctaaaacttgatagtcttgttggtgaatggaatgatgaacggtatgaactgatattagttaatcttcatggtcttcttgttaagggataataactacttggtgttctgctaaaacgatagttagaaatagcattattttggaaattagttgatcttaatggtgtgtaattgttgactctagattttggtgtgtagtcaaaatcaagagaaaaacgatcactagttaaactttgattggtatcgctgtaaagtggatcactgtatttagttgcaacatactcattttcaggataaaaacggctgaaattgctactttttatagtgttatcactctttagagcaatatcactcattatcctttggtggtttaaagcattaattttctctagaagagaagcgtgggaagagacactaacagtgatatctgaatcagttgtgcgttcaacttgtctaggttgaaaaccagtgtctaattttgattgaagtaaagctgctgatcttggtacaactttaatttgtaaacctgaagttggcaatggttgttggggttgatattcagtttttacttctggttttcagtggtgaacttcaacttgaggagttgattctacttgagggatgtattttgtttcaggttttggttcaattcttggttcaaccatttgagctttcggttgaacttcaacttgaggaatatgttttattacttctggttttgattcaattcttggttcaatcctttgaggttttaaatcaacaacaggttttggttgaacttcaacatgtggtacatgttttacttcaggttgtttaacttctggtactgaatcaacaacaggtttcacttctggttttggttgaatttcaacatgtgatacatgtttcacttctggttttggttcaattttgggttcaactatttgaggtttcggttgaacttcaacttgaggaatatgttttacttcaggttgaactaactttgctggtttattaactagtggtggttttaaagaaggggaattattaaaactatggttttgagatccactatcaacttgaacgggttgttggtggactaaatcctgatggagctgttgagtaggtggcacttctttttcaacaaactggtcatcacccaagttttctgtaggttgttggggttgatttaaactgtcatttaattcaaagacatcaggttcactttcagtttctagagtagtgtgttgagctgcttttggttggtcatcaacttctatcttaggaagacctgcatcaatactaggataatcttgttgggttggttgttcttgagaagtttgagtactgcttaaatagttaattaaagggacctttttctcatcagtatagctagaaacatccaaaacattaccattttggtcatagaaagtgttgttatcctgatcatattgaacagttaccaagttgttcttatcatcataagcatttaagctaacaatgttatttgtaaagctaatagggttatctgaagttaattcaaacaaaggatagttactagctaactgctttcttttttctaaagagaagatattacctgattcaggatcttggtatagagcatgaaccttatttttatgatcacgggcataaacaacactaacatcaggatatcttttgttaatcttttttaaaagcttgttataggctttgtttattttagctttctgtttatcgttcataaaaaattactaaattagggttttaaaccgccttttggcatcaattgtgatgggttaggacgttgttgcatatttggattaaacccagggcgttgttgcatgtttggattaaagttatttggttgtgcaaattggttaggatggggttggttaaatccagggcgttgcatgtttgggttcatccttgggttgaaattattgtgtggttggaactgttggtttggttggttaaaaccagggcgttgttgcatgtttggattaaacccagggcgctgcatgtttgggttcatccttgggttgaaattattgtgtggttggaactgttggtttggttggttaaaaccagggcgttgttgcatgtttggattaaatgcaggtcttaaaagcggaacacgctgttgaaactgtggttgaaggggttgttgaacttggggttgggaaggctgagcttgggattgttgaggatcaatttcaactgtttgttgttcttgttgatctgagattctttgtaattgctcagcaatctgttcttggcgttccttctcttcaagtaaacgtttttctttgcgctttacaataggtaaacctatcgcaagtccaaggataatagctaaagcactaaaaccaaatgaacctgctactgtagggataaatcagggctgttcaacaattgatctgccctgaattacagttgtattatcttctgtttgatgaaaaacaacccctagttcactaccattagttttcacaacaagtgcaaatgctagtaacgataaactaacaattaggattgttgtaaaaagtaaagcaagaactataaaaagttttttgtatctcaaaaatccatttaactccatctttatcaaaacttaattagttcctttttcttcttgatcttgaatcatcataatactcttcttgttcttgctttttcatgttcctttttcttcttttaattgaacgagtgattttattgagaaagaagttaacaattaaagtacctattaaaccactaacaaatgccattcctaggggaattacatacttagttagataaggtgtaaactgttcaacaaatccaggcaacttagcatttttcaaaaaatctacatatcctgggatagcataaaatgcacttttttcagttggaaaacggttatccaaaccattacttgaaccttctaaaagttgtaataagctacttgtttgagcagttgcagttgcaccattgtttgaagagatgttatccaacgcttcttttgaaaagaacctgttgaaaacatccattggttgtgctaactcaaatgggtttagagaaccaaagtaaaagatagctaagaaaagataagcaaagcctaccaataccaataaaagaaagcaaagcttaaagagaaatcgaaacaagcgcatttgtattagtcaaaaataaaactactctgtgaattttaactttatttagttaagcaaatggtttatgtaattaattaaattaactatagagctttagaaagctctaaactctagaaaaatttttagtaattaggatgattcttaggatgaaatagaccaaattcatgaagctgctaattaatcaagccccaaagaataaagcagatcttcagctctgtcttcttgccatttcataatcttcactttcatagtatttaatcaaatcttgttcattacggatctgtaaactcacaaaataaactgaaattaatgaaaagattccccctactattaaagataagccagggataattctatcaagtaggtttgttgtagaagcaaacactgtaaagttcaaaataaagctcaataagctcgctacaatactaattacaaaagcccataataagatgtgaaacaaagtttgggtttgttgatatcgccttttttgacttggtagcgcacttaatcctcacactgaaccaaacaccaaactagcacctaaaaaagcataaacaatgtcattagcttcaaagttaacttgttttgaaaatgtcgttgctaaagttaataagatcccaagggttatcccataactaatcacatcagtaatgattaaggcccaaaaccatgtcaaactagtgttgggattccttaatttaaaagcagtaacaaaataaagaattaaagagacaaaactagtaataactgcaatagtactaagtgttctaaaatcactagctaaatcaattagtgtgcttcttgaaagcaattgttgtactgttaatgcaacaagaaagataaaaaagatcccaaaagcagctaccataaaagttaaacggattacagaaagctgttttgtttgtacaaactgctttgctgctaaaccgttttgatcaatatagccttttgttgaattaatcatgacaatttgacttgttaaattttaatttgtcaatataaaaaaactaataattgcaaaatatatagataaggatacttacccaagtggctgaaggggtaggcttggaaagcttatagatgggtaaaaccatgcgagggttcgaatccctcagtatccgccagggagatttacccaagtggctgaagggggcgctctcgaaaagcgttaggtggttatccacgcgtgggttcaaatcccacaatctccgccaaattcttaactgtataaacaaaaaacacaccattttggtgtgtttttttatgtccataagttagttgaatttactcatcaatgtaacctgaatcacgcattgtagcaatccctgaaggggcattacggagtgaaaatcatggttttaaaagcgaaggaatagtttcatttaacccaggagcggagactggtagaacaggaaagtaactatctactacagtaattaagaacttagcattatcagtgtcctgttcagctcaaatgctgttaaatcggttaagttgagcagcgttgtcataaagatctttcaattcataaccaatgtggatatctgatacatttgctggtttgttgtcatctatcttgcttctttttgatagatatttatcaggatctttaattgcttctttaactttatcagctttcaataccttattatcaactaaaaatttcagtaagcttaatgcttttttagtgaatgctaatgaagcggatgtaccgttattaccattagtaccaaagttcttaatgacatagggatcatctttaaaaagatcagcacttgttatgcaactacaccagtcttttccgttagttgttgtgttattttgaagtttattttcaatttgattaaagacattgttttgggatgcagctaacaataaagttctgacaatatgactacctgaattgtaagtaattacttcaccaataccctcactgttaagctgtgtagcagcatcaagtcaggtaccaaccccatcataatcaggactccaataagaaaaaccaagtacacttgataaacctatgtatcattcgtttcttgttggaccttgtgcatctcctaagataatctcagggataattaaattttcaccattatcattaccaagttcagttaaagcttgttttaaagcgttatagtaatcaacttggttagaggagagtgatgcatttcctagtttaatgttgaagtgtaatggattgttaccagtaaacccaactttttttaatgcactgataaaactttgcttggtaacacttacttgttttgaagaaacttgactagtttgactactgctgccactagtagaagctgttcttacttgagcaccattagtttttgtagagctatagtaacttaacttaacagttgcagtatcaagaacattcttatccttttgaaaagttccagtttgttcagggattaaaccaagtctttggttgttgttaatcttgtaataataatcattctcaattccatctgtatttgtaccactactagttccatttgctggtttttctttaaagatcccaaaaggaacagtagaatagttaacatctcctgagttgggcagatcaatgattgctaagttctttcagttgatcaaaccattaattccagcacggatagtcaacgcttcttcagattcactgttatataagaacttagcttctgtctcagtgatgtttgcatttagttgaacagtactgtcattagcaacataaggtttacctgaataagttacttgagcactttgcgcagttttttggatttttaatcacctcagatcccctgtaccattaaaccttgatcttgcatcttgttgttgggaatagggaacagctgaagctgataagcccccagcgatataactagaatagaacacttcaggagtagctcctggttggaaataactaactatagcagggataggtttttcgttttcttgtcttgttttaggaagattaggggtgataattgcatcataaatctggttgcgtttaaagacaatttgtgcttggttaaaactctcaacatagtaagggccaactgatcaagtgtcttttcaagcattaacaccccctccatagataccatcaaagttagtatttgcttgatctaaaatctttctgttgttattttggttatatttaagcggtgaatctttacctagtttaagggcttttaccttaggatgggtgtgaggaattggaaagaagaattcctttgacatcattgatagaaagaaaggaaaaggagaagttagataaacattaaacttgttatcatctacacttctatagttttcaacatcataattttcatcagtgatctcaatacctttaccattgccatcactagaaccgttggttttatccataccaacggttttttcaacatcaagacccattaggtcaatgaaataaccattccggttaaaacctaagttagaagagagaatataggtctcaaaacccctttcaaagtctttagaggagagtttaactggttggttgttttgtttgacttctctaccagcattatcaacccagctcaaactagtgttaatggtaaattcatatctggttgcttcttgggttatcttgtgatagttaggatcttcagtaatagactttgaactatcacgataaattgtgcctattgcatcccactcattgaacttagtgtaatcattcttactagatccatcagaagaatctgttgaaccgtttttttgtgctctacctttaaggccactgtgtgttgtctttttatagccagtaactgataaagcaagttctaacactaatttttctttaatttggtcagtaacattaaccccatcatcacggtttgtaccagtagcaacatagttagttaaccctgcataagcattaccaaaaaaagatgaagtgggtgaaacgttaaacatgctcaatggaacagagttgttctttaacaaatctgctgaagaagaggtgaaaaacacccctttgtttaactgtgaggatgcacaagcacttaggattagtgctgcactaactgtcagtgtagaaccgagcaacaagtatcttttttttaatttcattgtgttctttcataaataaatcggttaattgattgctgattagtaaaaaagagttaaaaaacagcaatttacccttagttaaaaactaaaagtagttttattctagtttgcaatcacattagattgcaaaatcaaaaactaatgtttttatcaattgctcactttttaaacaagaaaatgcttaatacaaagttagcaaaactaaaaacatggtgcacccgaagggacttgaacccccacttctagatgaaactagatcctaagtctagcgcgtctaccattccgccacgagtgcattattggtgcatcttgaggggatcgaacccacgacccaatgattaagagtcatttgctctaccaactgagctaaagatgcagatagtggtgccgactataggatttgaacctacgacctattgattacaagtcaattgctctaccaactgagctaagtcggcatggtggattgtgaggggatcgaacccccgaccctatgcttgtaaggcatatgctctcccagctgagctaacaatccatcacttatggtgccgaatacaggaattgaacctgtagcctatgcattacgagtgcatcgctctgcccttgagctaattcggcattggtgacgcgtacgggattcaaacccgtgaatgcacgcgtgaaaggcgtgtgtgttaagtctcttcaccaacgcgccaaataatggcggccacaacagggatcgaacctgtgaccaaccggttaacagccggttgctctaccgctgagctatgtggcctgagaataaattctagaatttctagccaattttaacagcttccttaggatatgaataactatttgctttgggatgttttctaacaaaagttagcacagaactggacacaccaacctgtcccataaccattaatagacataaagcaaggaaattaaaggtatttctatttggatctaaagcaatgttaacagtagctccacttgaaagtccaactgttccaaaagcactagttgtttcaaataaagcatcaatgaaactaactggttgttccatacttaaaggtagaagaacagctgttagtaaaactgcaattaagcttatgattagtactaaaaaagcatctattactgtagtttgatcgattgaacgcttaaatgcttttacttccttttgacctttaaacttagcaactagagctaaaaagattactgctagcgtagttgttctaatccccccagcagtagaagagggactagcaccaataaacattgccaatgcaataattatttttgtagtttgaatctcactagcaacagggaaaacactaaaacctgctgaacgggatgaaataaccataaaaaagagctgcattaccctacttgcattagggttattaccaaaaactgacgcatggattgcttggttagattgtgattgcaattgggtatttattaaactctttttttcatcactaaaattaacaatagtgttagttaaactatcactagcaataaattccaccattaaaagtaaggtgaaaaaaagcaggattacaacgatattagtaattactgtcaacttggtaaatagactaaattggtgttttgtgtgtctaccatacttaatcttttttttaatggcttcaaagccatcaaacaaacaaggataaccaattcccccaaagataatttggctaatagttaaccactgaataataataccaagtccatttctataaggaacaaaagaactaccccctatcagatctatcccagcattattaactgctgataaggaatggaaaaaacctgcttgaaaagccttattaatatcattaaaagctgctattgtttggtttgaatcaactactaaagcttttaattgagttgaaacttttgcatgatctgcaaacaagttagcaggttcaaagcctgggatgaaataaaacaaaataccatataaaaatccataaattagttcaacgataaaaagaaagatgatagatactaagatcatctcactagtattacctagcttagaaccacctcgttctgattgcaacattaacttttcataaaaactgtattgttccttcttgtgaaagttaaacaatcgtcatgctaaaaaagcaataacaacaaatccaatccctcctaactggagtaatactgctaaaactatctggccaaagatactgtatgtttttgatacaacaacagtagaaagtcctgtatcactaaaagcactggttgataaaaataatgcatctaaaaagttgtaatcagttttctgttcaaatctttttccctgtcaatcaattccataactaaccactttttggtagttatcttggagtgcaattggcaaaaataacagcaaacttccaaacaagatgcaatagatataaaaacaaaaaattcgttgggtaatagtctcacctcagccaattttttttaaccaagtggtgagttttaccatctggttttgtcttcttgtcattaaaagaacgctatcaaatataattttaccaaggtatgaaacgtgcagatttttgcattattggtttaggtagatttgggatgcaggttgcacaatcactaaaagaaaacaactttaacttacttttaattgatcttgatgataaaaaaactgacaccgcctcgcaacagtttgattatgttatttgttgtgatgctagtaatctaactgctttagaagagttacaaattgatgaatttgctggggttattgttggggttaccaacatagaagcgagcatcatgatatgtgctaatttaagggaattaggacaaaaaaacattattgctaaagccaaaaatgaagtacataaaagggtgttaagcacaatgggaattagagaagctttgatccctgaaaagattgttggtaaaaatctggttatccgcttaatccatgggcttgaaaatgaaattatcaaccttggtaatgagataattttcatccgttcagcagttaacaacaaggctttttttaacaaaaggttagaagagattaactttaggcaaaacaccgatgctaacattatctccatcatgcgcagtaataaaactgttgtttttcctttaggaccaaatactgagatccaaccaggggatattatcactgcagtttgtcaacaaaaaagtttaaataagtacttaaattacatcaatcctaaaaccaaaaataaaaattaaaaaaaggatcatcatgatcctttttttagatagcatgctgtcaataagccatgttctgttttaaagtcagttatttatctacagcaattgctgtcattactttaattatttgttcttaaagcaacattcccttaccaaaatttaggtttcttgcttgtggagtttaccgcgtttcatacctggttttcaccaagctcgtctctgtggcactttcaaaacatcatcatagtattaaccttagactagttatgtcgttatggctatcacatcctaaatcttatcgctttgatttacacaaacactacttgcattccagcaagtgcaagcatggactttcctctactttaaatatatctttaaagcagcaactaaccgacagcgtcaaaattataatttggtgttggggatgttttgggtttgacataatgctgatagacaaacagtagcattggggtatgccccttacagcgctaggttcaataaccgacaaagaaaataacgaagtgttggtagaaccaaatttgatcattaaccaacaagcaagtgttaactttgcttttgcataagtagatactaaagctacagctggtgaatagtcatagtttgctagctgtcatagtttatgactcgaggttaaatcgttcaatttaacctttaaaaatagaacttgttgtttccatgattgttttgtgatcaattggaaacaagacaaaaatccacaaaactaaaatgtagaagctgtttgttgtgtcctttatggaaacgggttcgattcccgtcatctccaccatttatcaactttaagttggccttacactcccctagttgggagtttttattttgccttactctttttaaagagttgttttaatttggttttgttgtaattaaaagcaaagatagctataaaaaagaaagaataaaaaactaagctaatcgctcaagcggtagcaaatacaccaaaactatttaatttagagagataaacaccattgttattttcaacattaaaaaacaagctaaaccgcgttgctgattgaattttttgtgtatctctttcaaaaaactgttggtctaataacaccaaaaataaaaccattagcaagatccataagagataaacaacaatactgataaaaaatccagtagtatagccaatgcgctctcacttagtagtctgacttttaaaaaataatgaaacagttcatctaaaacttagaaaaactaataatgctaaactaattaacccaaaaactaagttagcaattccatattgactaatctgataagtaatactagcttgaataatatcagttggtttttcaacagttcaaaaaaggtaaaactgattaaagccgttaacttcgttaaaagtgaattgtttagtgtgaaaaacgccagctaaaaacaaaacgttgtttagaaaaaagcagagaaaaaataaaaagtaaacaaaagtatcaagtaagccaaacctgctgtaaaacagatagttactgtgtttggaaacaacttgatactcagcgacatttatttcactgagtttatcagatatcttattaatccaaccaccaccactatttttctttttagaaagcacgtgggatagatttagataatcaaactgatttttcttttttaacaagtaccatatcttctatcctaattccaccaaggttaggaatatagatcccaggttcaatggttacaaccccattttcacacaataacttgttgtaagattgggaaacatttggcatttcatggatatcaataccaacgccatgaccagtactatgcacaaaaaagtctttaaactcagagttttcaataatatcgcggcacaccttatcaacttgtgaacctgttaaagtagtgtttactgcatttataccagccaaattagcctcttcaacttttttgtatgcagataataactttgcacttttaggttttttaccaactaaaaaggttcttgtaatatcagagcaataaccgttgtaaatggtgccaaaatcacaagtgataaaatcaccttccttaactattgttttggttggtttgtgatgtgggttagcaccgtttttaccagtagctactataggatcaaatgagtttttagccccaccctgcttcacaagctcattagtaatccattgtgaaatgaaaagctcagtcatttttggtttaataaaacgctttaacttaactgctacttttcttgtaatatcaactgctttttcaatggcttgaatctcactaggcaactttactcttctaatctcttgggcattaattactgtgtattgtttacaaatagcttgaattcaatcctgatagttaaaggtaagatagtcaccctcaattaaaaggtgattgataccattagattcacaaaaagctttaacttgtttaaaactaacaaataattcaacttcaacaataggattaataaagttccttgctgcttcataatacctaccatcaataaacaattttgctttattgctggtgatgattaaccaccctgcactacttggaaaattagttaatcaaaagcggttttgatcagaaccaattaggatagcatcagctttattggtttttaaaagatctttaagaactgtaattttttgttgtaattcactaatcattatttacgttttacctctttgtgcaatactaccttacgacaacgtgaacaaaacttattaagtgctagtttttctggatttttcttgacgtttttaaaggttaaataattaatctcagaacattcattacaacctagtcgtgtgcttcttttaacagccataattaaattatcttaattatttattgtcaataagtaaactaatagaaaaagcatcaatgccagtgtgaacaataatcacacttgtaatgaaagcattttcaatttcattttgaaagttaatcttattatgctcaatgaaatcagtaattatttttttaatttcattagcgtaatttttacaaaaagaatagcaaaaaccgatccgtttaattttgtagttatcaccaaacttagttttaacaaaaccaaatatcttctcaaccgcttgactaaaactaaaaacttttgctcctagagtattaactcccttgtcaaacaagataataggtttaactcttagtaaagtagtaatgaactttttcaaaccagagattctcccacctttacgcatttgcactaggttttttaaagtaactgcagaaaggatattttgtttatgtgattcaacctttgctttaattgtttgattatcacaacccttgtcaaccaatgcctttatatcttcgaccaatcattttagagaaatagcaatatcactagtttcaaacactaaaaattctttgtctttattttgttcactaagctcttttgctaattgaaccaacatatcataagtaccacttaaacctttacttaaaggcagaaaaataaagcgatcatacttagttttaatctcttcaaagatcttaagaagatcactttgacgtggtaaggaagttgagatgttaagtccatgtgggttttcttttagaagtttatgaacatgatcataatcaatttctatcccatcacgaaagcttttttcaccatcaacaattacttgtaaaggcaagatgtaaacgccgttaatctccccaggtttaatagaagcagttgaatcagtgatgatagctgttttcttcatgaattaatctccttagtacctttgtttctttaaattatctagaaactctagcacataatcaaaaaaaagtttaggcgctgagtcgtgtggtgaatgaccaacaccatcaataaccttaaaaataatcttgtcacttttattagctagatagtctacagaagctttggttggcgtgacaatatcattagctcctaaaataactaaggtaggtttattaccaatcatttcataagccctttcaagtgagtcattaccatatttagcgttttgaaccatatcactgtaaagtgttttaaaggtagttctttttttaaatgcattgatagctattttcaaaagtgatttacgtttttcttcatgttcaacaaaatccttatggttgctgttattacgcttaaaaaaagtatctaaaatccgctttttattaactgagaaagaagtttgattcataggagctactaatattaaagccttaatttttagtggtataactttgttaactaaaacagccacagcacctcccatactatgacctattaaaatgacgttatttagttttttttgaacaataaaatcacaaaccaaatcaacaaagtggtttagttttaattgatctgtatctgttgattcattgtctccatgaccgggaaaattaaaagtaaagaaaggccactttttctttttaaacaagctaaaaatacgactaaaactggcatattcgcttccaaatccatgtaaaaaaataaaaacgttttttctttttttaggtttaaaggcaaatattgagttaaaaagagtatttttattactcgttagcattgattttagctaaacgttctgcatatgcttggatgcgttctttcttagaaagtttagcgagtttatcatccttattttggataacaaaatcacgttttttaattcgtggtttttttatttcaactggtttatcttcatcactagcttctttgatctcttcagtttgattagcactaatgtcattgaaatattgcaactgattttgcagtgcttggttttctaaaaaaagttgttctttttcaatttttaatgtttctagttcatcaagatgttcatcactggtaactggagtaaattgaagttcttttttagcattttcaagtgaatttatttgttgttttaactgattattttcactatcagatgcacttaaactttgcttggctttctccaattcactgtttgtttcttcaaaagcagagagtaaatcttggtattgttcattagcatcattcaatttattctttttaagcttttcaaaatcagtttttaatttgccatagctttcttgtaagatttcatgatcagcttggagctttgctaataagttattgctattctcagagcctgataattcatcttctaaatcattaattttttcattaagtgctaaattaacttcttcaagcgtggctaatttatcttgagcaacattaaaaagattttgagagtctttgagttgctgttggagatttactaactgattggtatttaaattactcttctcttcattccattcttctaactctgcaattttgtcttgcagttgttgattttgaattgttaaaccattaagtttttcatcgagtgcttttttctgttcttcaaatgaatttttagtgttattgaagtcattatctttagaccttgttcactcaatttcatctaataaaacatcattttcatgtttaagtgctgaaattgttttttgataatctaagtttagcgcttgttgtttcacttgcaatttatcaaattttgtttcattctcatcaaaaagtagttcatactgatttaaaagatcatcatatttttcattctcatcattagatgtgttgtcatggagttttttcagttcatttttcaaaaaatcattttcttgttcaactagatccaatctttggtttgcttctcttgctgttagtaactggttttgaagttcgtttatttggttgtttaaaactggtaataaagctaattgttgttgaacattactgctcttatttttcaatgcatctaattgatctgaaagcaaagctttttcttgttttaaattctccaactcttcattaacttcatcacttaaaggattaatagcaactggtttattttgcagttgctcatataaatccctattttcttgcaaaagatcatcctgtaatttcttggtatgtaagtgcttacttttttcctcagataacctccttttaagatcatcgatttcctgttctaaatcaaatatttgatcattattattctctttaagatcatcgatttgtttttttaaatcagcattttccaataaaagctctttgttattatagtcatccaattcatcaactttttttgttggatgttgctcttttaagatccttttaacaacaaaaggttgatcatcattctgatcatattggatcgttttatgaactggattgatagctttggttaaattttcaatggaatagaaatcatcaaattgttcaggttctttaaccttatcagttgaaaatatttgaacttctggtttttttgtttcattaatctcttcactaggttggttaaacaactcttcaaaagatacttgtttagtagcttctggttttatctcatccttatcatcttcagcagtaatcactgatggttttagttcctgaaaaccagttttaatttccttggttaaaactgattgatcatcaacttcttgaaaagccatagtttgatcaactgtctgttgctcttcctctctagttttaagttgatttgcataatgatttaaaacattcttatcccattttttatctaaaacctttaaatctatcatccaattaaaaaaagaaactattgacttttctttctcagcttcatcaacagtaccaaaaaatgttttctccaataaatttctttcaaagggaatagcagtaattttagatggtgaaaaaaggatattattagttctttgtactaattcttttaaaagtgttttttcatcaagctcattatcaaaatcactaatttcaagttccttatctactgccatggattatgttggaatattagataaataagtatattatcttaaacttctggctttgttcttatccgtgcgttttttgatttaaagtaaaggctaataggtacagaattaaaaccaaagttttctctaatcttattctctaaaaaacgtgcataagaaaaatgaagatacttagggtcattgcaaaataaaacaaaatggggaatttgacttttggtttgtactgcgtaagttatctgcaaacgcttgcctttaaaaagtggaggttgattgtaaagttgtgcttgctgaataacatcatttaaaagtggtgttgcaaccttagtttcaagttggctttgaataattttaagttgttcaaaaatagtatttaagcgctgatttttcaaaacactaataaacaaaacaggcgcaaaatcgaggtgtttaaaatgcaatttcagcatttttttatatgcatttgtggtgttattgttttttaaaactagatcccatttattcacaagaataataacagggataagtgcagcttgtgccaatccaccaatcacttcatcttgttcactaataggttttgatccatctaccatcaaaaggataacgttactacgggcaatagctagctttgttttgatgtaagatgcggtttcaattcccatgttaattttgccttttcttttaataccagcagtatcaatcaaaagaaatttttcaccattaacttttaaaggaacatcaatagcatctctagttgtaccactctcatttgaaactaaaacacgattttgttttacaagttgattaataagtgagcttttaccaacatttggtttgccaattacacaaaaccttatttttgctaaatcatcattattttcattagggagtaattgattttgtttaactaagagatccattaaatcaccaattccaattccatgagcagcactaataacaactggtcttccaaaccctaagctgtaataatcttttaatgtttcttcagcagttttagggttaaaattttcagctttatttaccactagtattactggtttatccttattttttttaagaaccttagctacataaaaatcatcgctatttagttgttcttgtagtgacactaaaaaaataatagctttggcttgactaagtgctgcttgtacttgtaatgcaattagttgttgcaagggagtttgttttgcaattaatccacctgtgtcaataaaagctatctttctttttaaccattcaccaattccaaagatcctatctcttgtcgtgttaggagtatctgaaacaatagccattggcttttgaattaagcgattaaataaagttgatttaccaacgtttgtacgacctattattgcaacagtaaacacaaattaaagtttaaaaaccttctttgcttctttgagggtttgttttactactgcatcaaaacttagttcagaagtgtcaagataaatagcgtcctgggctttttttaatgggtctgcagttctagaactatcaatttgatcacgttgctttaattcttgaattagttcctttagttttttttcatttgatagagaaattcccatatcttgtaatcttcgctgcgctctaatttcaactttagcatctaaaaaaaacttcaattgagcattttttaaaactactgttcctatgtctctaccatccatcactatgtttttattttctgctagtttctgttgtttaataactgcaatttttctaatgttaggatcaacagctattttactagcaatgttagcaactgattgggttgtaataactgttgtaatatcagcattgttataatacacagcatctttctcaaagcgtcagttaatttgattaatgatttttaaaaaaagatcaatatttaatctattcacttgcattacataggcaaaggcacgatacatttttccactagaaaaataaaaaaaatcaagttcttcagctatttttttagcaacactggactttccagaactacttggaccatcaattgctatttgtcaattcataactaaatttaaacaaatgaaacaaaactaacaatcaaaaaaataagaaaaaacaaaatgctaaacagcatgaaacttattaaagttatcactaagttcttaaaaatagccttattagcattaaacaaattaggttcgatgttatcaatgctttttttaaaagcaaaactttcagttgaaaaaactgttagtatcttgttgtattcttttaaatcactagttaaattgcttgttttttttaatcattgtttctcattagcttcataaaatttacttaagtggttaatcttttctattcccttatcatcactaattcagctttcataaccgctagaagtttggttatatgctgcgtttaaccacatcctatcaactttttcttctaataatttaaagtcagtattttttaaatcaactattaattcctgaagtgttttaaacagtttatttggttcagtgtgatgtttaactggatttttattaaattcactaaaaggatggtaattaatcaagattttctgattaattttattaagctgtttttttcagctttcagtgttcttctgagcgttaattaaagcttttttaactatcttattgttatcaaaactttgtctataaaagcgaaatttttctactcttcccatgggttggcattatgaacaacaaactgaatgtcatcatcttcctcacaagcattgagaaaacgtgataataaagtttgctgatttctatctaaatcaacagttaaaagaggtaccaatttaatttcactatctactattgaaaaattgttttttttcaacagctcctttgcatgaaaataactatttgaatgcaagctaatttcaaaacactcttcatcataatcaacatcaattaagttaatattgtccaaaattaataattcaattagatcatctttcaaatagttatttttattaacaaagataatcccttcttcttgaaaattaatcttgacgctatttggcttggctaattgtccttttagtttagctaaataaccgtttaaactactgagtaaacggttaggattatcagttagtccaaacacaataattccaacaccatttggtccaaaaatctcataacaaaactcgctaattttagttgtatctttttcactaccatggatatttcttttaattgaatccatgcttagacccttagctaaagcaagatcaactgcaacttttagatgtggatttgactggatattagttccaccttttttaacagctgaagctattctttttgctagtttttgaagttgttttgcacttgtttgttgttttttattagtttgattagcaattagatgcttacgtggcatgtaagattaaaaattattagcaacttggtcaactttgtgtgcaaacagatcaactacctcttgcttgtttttatctttgtaaagaattttagtgtcatcaattaaaacactctcaaaatgtgtaacacctgcaaaaccaaacaagccctttaaattactaacatgatcagctcaagggtatcatcctaatggtgcaccttgtgacgctaaaacaactaccttaagattagtaagtaatcccttagaagcacctttagtaacatatttgtcttgaaaggttttattagctacaaagacatgatcaataaagttttttaaactagcaggataattaaagttggtcattggtgcaaggataacaattccataagctgtttttaggagcatcaatataataatcactattttcaaaactaaaaaaattactagcgttttgggtattataagatatcttacctactggtaattcatttaaatttcaatcaataaattcaacactactattttgttttttataagtttgaaggaaacgatctaataaaaggtgggtgtaagaaccagaaggggttacagaagcatcaacaataataactttcttcatagctaataattaaaagtctaatttttattgttaattctaatgagctttagttaatttagcaattaattggttggtttcagtaagttttttttgatattcttccaattttaaaaattcactttttaccttttctttgggtgctttttctagaaagcttttatttttaacaatagcttggctacgttttacttcactttcaaaaaaagcttgttgcttctgtagagatttaagtctttgggttgtatcatcaacaatttggtatttaaaactaacttttttattagtttcaattttcagttcaattcaactaaagttaaagtattgtttaacatcaacagcatttttaccagataagataacaactagtttttgttgtgaattaagcatgtactgttttctgtaattgcgtaagtcattaatagcagctaaaacaagatcaaaaagtttgggaattttaattttagttgcaagaggtcatgttgcttgcataacacttttattgttaaattgctgataaatacgctcagataaaaaaggaacagtgatactaagcaaaatagcaatattagataaaactgatttagcagtataaaaaagctgtggttttagttgatttggttcttttttaattgcttcaatgaaagtattgcaaaaatcatcccaaacaaatttaacaagaatttggtttgctaatgctaactggaatttatctagtagcttagttattttttgaattactttatctaatttagctaagattcaagtttcacttaatgaaagtttgtccaagtcataactaatttcttgatcattttctagttggataacaaacttagtaacattccacaatttatttaaaaaatttcatgcactttttattttttgttcgctgaaaattagatcatctcctggagtgtgatttgaacacaaaaataagcgcactgcatccgctccataatttctaataagatcaacaggatcaatgccattattcagtgattttgacatcttacgattttgttcatcgcgtactaaaccgtggattaaaacagttttaaatggcagttttttagtttcaaaaaaggagttaaataacattcttaaaactcagaaaaatagaatatcataacctgtaactaaaagctcagtttcatgaaaagagtcatcctgttctcaattcaaacaaattaaaggtcaaagcgaagaagaaaatcaagtatcaagtacatcttttgatctagtgtagttttgtaaattttttgaaggtttttcaccaacaactatttcacctgtattgttttcaaatcaaacaggaattttatgaccccaaattaactgtcttgaaatacaccatggtttgagtttattcaaccaatttgacacttgcttattaaagcgtttgggaataaaatcaggatatttttttaaatataagtgatcttttaactttggtaaatcaacaaatcactgttttgaaagcatgggttctacaacagtgccactgcgttcagaaaaaccaacattactagttaatggtattgatttaacaagtaatttatttttttctaatcatttaacaattttatttcttgcttgtaaaacactaaggccttgaaatttacttgcattttgattgagaataccgttactgtcaatgcagcttagaaaatcaaatttatatttagtgttgatttcatagtcattaaagtcgtgtgcaggagtacatttcaatattcctgtaccaaatttaatgtcaacatagctatctgttacaacaggaatttgttttcctgttaaagggttaactactaatttatttcagaaattagtatagcgcttatcttttgggtttaccaatagacaaacatcagcaaagatagtttctggtcttgttgttgcaactattagttcttgtttactatcattcgctagtttataaacaacataatgaagatgttgattaacaggtttattgataacttcaatatttgatatagcagtattcaattttgtatctcaattaacaagcgtgtatgcttgataaataaaaccgttttcataaaggtttttaaaacaattgttaacaattttattagcttgttctgaaagcgtgaatttagtttcagatcaatttaagcaaactcctaaactctttagttgatttttaattatttcgctttgatttaatgcccaattcatgatcatttcagattttttatcatcatctgcatcaaaatatttttgattttcttttaatgctattttttcatatttcgtttgagtagcaatgccagcatgatcaaagccaggaattcagttaatactaaatccctgcatctttttaaaacgcatgatttgatcagtaatactaacctcaaaagcatgaccaatatgaagagtacctgttagatttggagggggaagaattgctgtaaaagaattgtttttatctttaggtttaaaaaaaccagcattatttcaaatttcataaagcccatcactaactaagttgaaatcatagtttttttgaaaactaaatttatctttcatcttcaacgaataattcgaaaatttttttgtgaactaaagcaagattatgatgtgtttttgtacttgcaaaaacacatttatcaaaattaacttttaaaaaatttgcaatattcttaagcgaaaaatatctttcactttgatttagtttgtcaaatttattagcaacaatcaaaaagttcaatcctgtttgcaaaataattttaaccacttcctgatcttgaacagtaacaactccactatctactatcaaaacaacaccaactagattactacgaaaatttaaaaattgggtaagtaaattagtaataaaatctttcttatttttgtttattttagcaaagccataacctggtaaatcaacaaatcttttgtctttatattcaaagtaatttagtaattgtgttcgacctggtgttgctgaagttttagccagtttctttttaaaaaaagcattaatcaaacttgatttaccaacattacttcttcccatgaaacaaatctctgggatattatcttgaggacaatcttttaaatcacttgcactcttcaaaaaatgtgcatccatgtgtattttatttttggtttttaatggagcgcattatctcttttacctgggtttcagataattttctacccatttttgcatacattgctttaatttgattttcagtaataggtggattgtcacgcatctgttttttaaagatttttatagaaataaaataaccaagaatcattcccaccaaaagcgaaagagggatacctaaacctaatgcaagtgctagatcattcatagctatatattaataattaaacattttaaaagtcttataaaattaaataatcgaattaatggataaacttgttagtatattagttccttgttacaaatcaaaaccttttttaaaacgtttttttaattcacttttaaagcaagatcttaatcaagctaaaattatttttttcaatgacaatgttgctgatgaaacctatgaagttttgcaaaaattcaaaaaagaacacaataacttagcaattgaagtctattgtgacaaacagaatgaaggtattggaaaagtgcgtgataagctagtgaatctagtaacaacaccttatttttattttatcgatcctgatgattgttttaacaacaaaaatgtcataaaagagattgttgaatcaattaaaaaagaagattttgatcttggtgtattaaaaagtatggtctatttatgcttcttaaaacatgatttcattattaaatttttgcctttaaaaggtatttttcaaggcagagtaaaattaattaataataacaatgttaataaattaaattacatcaaaaataatgatcaatatatttgaaatattgttataaacacagatttttttaggaagctaaatttaacttttgaatcaaggttatttgaagatataccaatctgatatccgatgtttttttcatcacaaaaaattgtttttattgatgtgataggaacaaattattttattcgtaatgatagtttatcaactactattagtgctccacgctacttaaatttaatccaatgttatgaaaagctatatgtaaatctcagccaaaatggttctcttgcaagttttattgatccaaatcataagattgaagctaggttttgaagaaggcaaatgtttgtttgatttgcacttttcagctttgaatactttaagaaaaatttttctgaatcaaaaaaaattcttgaaaaactatttgtttttttggaaaaaaatggagtttatgaacgtgtttttcaaacaaaaaatcaaggtatttactatatttgggtacagcgactaaaatattttaaacatgttttggaatctaaatcagataactaattaagttctctttaaaaaatcaatgagattaaagttatttaaagcttattgtttaatttacttaaattaagaatctttatcttgttaaattaatacttaactggtttaatgtctgcaattaaatttaatcctagttcattcagaaaaaactttaaatggtttgaaaataacaaaaattggattaattttgataatgctgctacttccattgcacttgatgttgtggctgaagcaagcaaagaatattaccagtatttttgtgtcaatcctcataacaaaaatcctgaaattaaccaaaaacttattgctattattgaagaaacaagagatttattagcaaaatttttcaatgctaaaaaaaatgaaataatttttacaagttctgcaactgaatcgcttaacttattcgcctttggattaagctctttagtaaaaagtaatgatgaaatcattctcaaagaagatgaacatgctgctaatgtttttccctgagtaaatctagcaaaagaaaataaagccaaactaaaaataattaaaaaaacaccaaataaatcttgaactgatgcttttttaaaagcttgtacaccatcaacaaaactattagttataactgcaacatctaatctttttggaaatagtattgactatgaaaaaatttctaaacacttaaaaaaaatatcaccaaatagctttattgttgtagatgcagtacaagctgtaccacaccataaaatcgatattacaagtgctaatattgattttttaactttttctacacataaattttatggacctactggtcttggcattgcctttatcaaaagcgaattacaatcacgactaaaaccctttaaattaggtggtgatatttttaaatcattggataataactttaagataatttttaaagaaggtccttccaaatttgaagctggaacgctaaatattatggctatttatgctttgaataaacagttaaaattcatgcaaaaagaatttaatttcagtgaaatggtgttttacagcaaacaattaaaaaatttagcttatcaactgctaagtcaaaatcctaatatcgttttagctaatcatgatcaagatgttcctatctttgcttttaagcataaatatattaattctgcagatctagcaacttttttaaacattaaaaaaataattgttagacaaggatccatctgtgttggtaaatttaaaaataaagagagttttttacgtgtttctctactccattacaacacaaaagaggaattactttatttagaaaaattattaaaaactagtaagaattccattattaatgaactaatatattagctaatggatattagagcaagaacaaaaattattgatatttattcaaatttaaaatacaaaaaacctctcaaaagttttcaaaaaattttaacaacaagtgatagtgataattgtgaagacttttttaatataggtttaaatattgataaaaataaaattactgcaattggttttgatggtgatggttgtattatctctacaattgcaactgaattaagtattaaagcaattgaaaataaaactattaaccaagcaaaaaaaatattatcagatttaattgcaacttataaagataaaaattcagcaaaccaagttgttgaagaattaaagcttttaattgaaatgaatgtaactgaaaaaaggttacagtgtttgcttttaacaccaagcaacttattgcaatggtttaaaaatttttagcattaatagctaacgtttgtcctaggatatcatataagcgtttatcaccaactaaaatctgttgatgttctctttggtgttgcttttgattttcacgaattaaatctaaaaatgccaactcttgagtgccttcatctaaagcttgttcaataagtaaagacataaagatctctttctttaaacctaatgaattagctttattattttttcaattactagaaatcttatttacatcatcatttgttatctgaataacataactaagagtctggatactagagtcatttgttaatggaactgtttgcacagttttatatccttctgtattggaaccatctgtatttgcagctttagataaaccaacataaccttcaaatttatgaaaataaagatcatctagtctatcaactacatttaataaaaacttttttttattatcaaaacttattaaaggttcacctctagagttaaagcgacttaaattatttgtatcaacattaactgagcgatgtaataactcaccaaaagcattaagttcagcatcagaactggttttattaatcaagcttcacaaggtaaacttatccttatattgacttaaagcgcctgctttatcagttgctgtaattaactgtccgtaattattaaaaagctgttgtgttaaaccagcactagctgttgaaatactttgattggaattaattgttaaaccattaaatccataaaaatattttttatcacttgatccttgtgatttattagataaagctacagaattattaaacggttcatcagtaaatctataagtgttttcactttcaagcaatgaatcgggttgaattggtgtttgtttatcattgaatcagtttatttcagaaccttgagtatagttaggattttgtaaaaacctattaaaagggttttcattagctgatgaagtactggattttgttttttgactaacagtagcgctagggtttttatcatatcctactgttcatgaaacaaatgctctagtgccaattggaattgcttgttgtaaaagattcttatagttttgagcaccatttttaacaagtcacattaacgcttgcaaaaagcgcatgtatttgtactcagcatcctgattaggatcttccaattccttttcaaatgctttctttgctaaatctaatagggtttgattaacactactagaagtatgagattgggcagctttattttgcatttgcaacatagttgaagttgaatttacactacccaaatccttatagtaaccaaagcgttctttactagttaaattttgtcaagaacggatataaagtgcctgtttaacaagatcattaaaatcagaaaattcaccttttaattctttatttgaagtatcaaaattattagtgaatgaattagtgtttttaaagtaccaatttttaaagatgtttgcaacagtacctgttctaattcctgaatcagttaaaagtgataatataagatcaagatccaagtcatttaattgtgatgattttagggtaataatctctgaatattgactagaagaataagttgtagcttttcatttttcaactaattctttggctttattttctacttcagttgttaaagtctttaaagtttgattatttttttcacgagttggttcattatcagaagtaatagctgcagcagtggttttcaaagttaaagtttgagcactactttgatcagagttgttattaaaaaattttgctaatgaaggataactaccatcatttgctcttttatatggaagaggttgaccccaaccaattgaactttctttagcttccttttgaagtttaatgtagttgttagcacgatcaacaattgcttgttctagtttttctatattagctaaatctgttctaaagttattaagtttattagcagctttaatataagactcataacttgattttatttgtgaaagtgaattattaaaatcttgttgttttttaatagtttcagataaattggtattgttttttaaaagttttttagctaaatcacatacatctttttgaccgttattattagaagttccattttctaacatagttgttaaagctgtgtaaagttttagtgttgtatttctatttgctcaacttctaaattcgctgttagaaccaaataaatcaactgaaaaactgacattatctttagagaaattattagtttgtccttgtaaaaatcgcattaataaaacttctgcttgtttttcaaaattacgtttgttaggtgatgaattctctaaaaaataattacctccatcaatatgaaatgcatatatggcatcatcacctctaacataaacaggtttctgttgctgtttttgagttgtctttgaacttagactaactaataaattacttgttactacttgtgcttgagatgaatttgattccattctaactgcatcaaaaatagttgcagtttgactactattatttaaagcttgtacttgttttcaaaaagactgcgtgttactactattatcactaccagaagaagaaagcgagggattaatttttaaaaattcacttttaacattaaaaccattattgtctgaagtaacttcttgactttttgtcatagcactcttcatcataactgttgttgcacttgaacttttaataaatttatcaagaggatttaaattgctactagttccacctgttgttgttgttgttgttgttgttgttgttgttaattctgttttattattcagtaagtaatggtattgatcaataactgcagcagataagttaacagtttttaaaacagagagaatgttatttttactaattaaaactttgcttgcactatacttgttttcaaagtcaagtaaatcatttctggtattagtagcagctgaactttgtgatgaaccactagaattagcagtttgtaattgtttatcaaactcttcaaataattttgcagagtttgtttgaccaccactttcactaggatcttgaaaagcaggaaagttataagaaagatttagattggaagctccaattgcattttcatcataaatactgccaagtccagcaattggagattggtaattgaaagaagcttgatttaataaaaatgggttttcttctattaatcactgtgaaaataaataagcttgaagattagtaaaaaaatcaccatttacatcatttaaattgctgttaataaacttaagtttattttctgttttttcaatgttttctttagttgttgcaacgcttgtatcacttgaattcactaaactaacatttgcactaatgttattgaatattaaagattgaaaatcagtaattaatctatcatagagtttaagtttttttcaactttcttgattaccaccgaactgatcatattctttttgtacttcaataggtcactttactctatcagcacgtttcttttcatctatcaagttatcatgttcatcttcaacattttcttcaaatatctttaatcgattagagatgtttctatctgcatttgcttggtatcatttttgtaatgctgatccaaaactaacacgtaagatagaatcaacaccactaccatcatttaaagcagactttaaaactacatctgggtttatgatattttgatcactaaaaccaattagtttttgggatcgattgagagtaggaaaaagattagcagtgtttattgtggaacaggctgtaattattgctgttgcacccactccactaaatgctaaagcaattaatgatcagcgcttaaaacgatgagccatcttatactagcagtttgataattatcacatttaaaaatctagctaatataattgcaaatctagattattaaaaaatgtatattaattataaataagttaatttttctaatttaagcattaaaaaagcttaaatctctctaattaaaatgctttaccagaaaatcaaaaaattagtttttagctagctgtttgttgaaatgaatttttattagccaattgttgaacagttagttcttttatttgttcaaataatgctggcttttctgataaaacatttaataatttttctttaccaacagcaatgctttcattgttaaaagaataagaatttccagctcttacaacaacattaaatttaagtgctaagtcaataacttcatgttcatgtacaaaaccacggttaaacatgatttctaatatagcaacaccaaaaggtttagcaatcttatttttagataccattacttttgtttttatgccaacataattgttgaatttatccttaagtaattcaacacgcttagcttccattcttaatgaactataaaatcttagagcttttcctcctgttgtaacttcgttatttccaaacatcactcctggtttttcgcgtaactgattaatgaataaaacacaagttttagaatctggtaatatcgattgtattcttcgcaaaccttttgacatcattcttgcatgcaagccaatagtttgttcttcaattgtgccttctaactcttgtttaggaattaacgctgctacagagtcaataacaattaaagatatcttgtttgttttaattaatgattcgataagagcaaaagcgttttcaccatgcctaggatgagcaatcaaaagtttatttagatcaataccaattgatttagcatatgctaaatcaagtgcaccttcagcatcaatataacatgctgttttacctgctttctgaaaactagcgactgcatttagtgcaatagttgtttttccagatgattcatttccatatagttctactatcctacctaaaggtagaccaccagaccctaatgcttcatctaaatttaaacttccagttgaaattgtttcaatttcactgtttttctttgcatcaaaaaaatcaaaacttgtcaaattattactttcaataaaactactatttttttgagtatttttcttattaattatttctttttgagccatctttcattacaccttataaataagtgcaaaaaaataaaaatgacatttttttattagaaattttgtttattttttaatttttcttaaaaaaatctctttttaggagtttatttttttatattagttaacttgtttggtttgttgacataaacactcctaaaactcctatatattattagtaaatatatagatttttgttcaagtctactcaggtgaagcttacatacaacagttcaagtggctcaaataaccagattagttttgattcaactagtcaaggtgaaaaaccatcctacatcgttgagtttactaattccaccaatgttggcatcaagtgaacgatggtgaaaaagtatcagttagatgtaccgaatgtttctagcaacatgaaccaagtgttgcaagaattgatcctagaacaacctttgactaaatataccttaaacagtagtttggccaaacaaaagggcaaaagccagatagaggtacatcttggttcaaattcaaatcagtgacgatcgatgcgcaactccattggcttaaacaacaatcccagccccaatgcttcaactggatttaaactcactaccggcaatgcatatagaaaattagatcaatcctgaccaatttaccaaccaattgatgggaccaagcagggcaaagggaaggatagtaatgggtggagttcaactgaagaaaacgaagctaaaaatgatgcgcccctaagtacaggagggggaacatcagacaacgcttcaaaattcaccaagtacctcaacaccaaacaagcattggaaaggatcggtatcttgtttgatggggatggaatgaggaatgtggttacccaactctattatgcttctactagcaagctagcagtcaccaacaaccacattgtcgtgatgggtaacagctttctacccagcatgtggtactgggtggtggagcggagtgcaacaactgattcatcatcaaaacccacctggtttgctaacaccaatttagactgaggggaagacaaacaaaaacaatttgtagagaaccagttggggtataaggaaactaccagtaccaattcccacaacttccattccaaatctttcacccaacctgcatatctgatcagtggcattgacagtgtcaatgatcaaatcatcttcagtggctttaaagcggggagtgtggggtatgatagtagtagtagtagtagtagtagtagtaccaaagaccaagcacttgcttgatcaacaacaactagcttagatagtaaaacggggtataaggatttggtgaccaacgacacgggattaaatggtccaatcaatgggagtttttcaatccaagacaccttctcattcgttgttccttattcggggaatcatagtaatcaaatttcatcaggaaccattaaaactgcttatccagtgaaaaaagatgaagcttcccaagtagcgatcaattccttgaatcaacctacgccgttgaatagttatggaagtggaatcttcttcctctttcaaccccacccaaaggttgcaaaaagatagtccggtgaaggattcaaacaaagacagtgagaaactcagtgaaacaactgcttcatccatgagtggtatggctacatctcctcgcaaagccctcaaagtggaggtgaaaaaacaaagtggatcaagtgacaccctcaccaaaaacgactttgctaaaaagccactgcagcataagaacagtagtgggacagaggtgaagttagatgcgagtggggagtttggtgacaacaaagcctgaaaaccattgttgactaccgagcaaatagcaagagagaagaggatggggatgccaactccccctccccttcttcttcttcttcttcttcttcttcttcttcttcttcttcttcttctactactactactactactactacttctacttcctcaacccccctccccactttttctaacatcaatgttggggttaaatcaatgatcactcaacatttaaataaagaaaacacccggtgggtgtttacacctggtagtacaccagacatctgaacgggagcagggtatcgcgttcaaagtgctaatcagaaaaacggcattccttttgaacaggtgaaacctagcaataatagtaccccctttgatcccaattcagatgataataaagtcacttcaggtagctcctccaaaccaaccacctatcctgctttacccaacagtatcagtcccaccagtgactgaagcaatgcgttgactttcactaacaagaataatccgcagcgcaatcaactgttgctcagaagcttactaggaactatcccggtcttgatcaataagagtggaacgggagatgagtttaaccatacgagtgagcagaagtgggataaaactgagaccaaggaaggcaacctcccagggtttggggaagtgaatgggtgaaaaatagtaactatttttttaaattaatactcttcagcaactgttttgctacctaagaaagttaactcttcatcagttaaaaatcctgttcctgctggaatttttccaccaataataacattctcttttaaacctaaaagatagtctacttggttcttaacagcagcatcagttaggatttttttggtatcttggaaggatgcagcacttaaaaaggagttagatttacttgccgcttcatcaattccaaacacctgattaattgcaataacaggcatctttccagctaaaagtaagctcttatttagttcattgagataatggctatgcactaactgaccaacaaataaattgctgttacctgcatctgttacttgcaacaaattagttagttgtctgataataatttctacatacttatcagcaatatctatcccttgaatcctatacactttttggatctctacaatcatgtattgtcttaccctttggatacctgcaattcgcaaaagttgtttaatatcaacagaaccttctgtaatcttagaacctggtgaaacttgatcaccaacatgaacacgtatttgagcactgaaagggatagtataaatcctctcatcaacgtttgatttaatcactacttcctgagcgttttgaacagtagtaattgatttaactgttcctttcacttcagagataactgctttttcaaaatctttaggagtaactacttcaaagatctgttttaaacgttcaaagccttgtgctaagttgttttcagttgaaactcccccagtatggaaagtacgcattgtcaattgggtcccaggttcaccaattgattgagcagcaatcaccccaacagcagttcccaattccaccaacttaccagttgacaagtcaatgccaaagcagtattgacagataccattttccctttcacaatagataacagatctaactaaaacttctttaatagatgttgcacaaatctgtttagctaattgcgttgtaataagactgttagcttctacaatagttttttgtgtttcaggatcaactataggagtaattgagtagcgattaacaatcctgtcaaataatgattcaatcaaggatttggttttggtttcaacaattgcttcaacaacaattccttttcttgttccacaatcatcatggttaataattaattcatgagtagcatctactagctttcttgtcatataaccagactttgctgttttcattgcagtatctgtcatcccttttctcgctccataagaagagttgaagtattcattaatggtcaaaccttcaaaaaaggagtgtttaataggaacttctatcgtatctttaatgatcttagattggttatttctttcatagttaaagcttttagacattaagcctcgcatcccaaataactgggtaaagttagaaatgttacctctagcacctgaatcagccattaccacaatggaattatcacggtactgttcttgtttaattaagttttggatctcatcagatactttttctttcacattgtttcataacttcacaacgcgtttataacgttcatcatcggttaacaaacccttgttataaaactgtttgtatttcagcacctgttgatcagcactatcaaagtaattttgtttattggtgtacttagggatatcaaatactgaaacagtagttgaagaaaaagtagagtacttaaagccaagtgctttgatattatcaagtgttttaggaaggtctttaaattccaataaaagatagagtagatcgattaacttggaaataacctttttggaaaatgcagggataatttgatgctttaaaattgattgtcttacatcttctccctgtttcacaatgaacttttcgggacatgcattttcatcaaattccccgtcattaatataaggaacattattgcctaaaacatcattaaagataatcttaccaactgttgttattaaagttccttggcatgcaaacttcttgttgggaaatgctttagtacttatccctacaatagcatgtaaatgaaccttttgactttcataagcagcacgtgcttcataaactgtgctgaagataatcccctctcccaactgtccttttctctctgtggttagataatagttacctaaaaccatgtcctgagtaggagttacaataggtcttccatctttcaaacctaagatatgttttgatgcaagcagaacagctcttgcttcattaactgcattctcacttaaaggaacatgaactgccatctgatcaccatcaaaatcagcattaaatgcagtagttactaatgggtgtaatctaattgctttaccatcaacaattcttggttcaaatgcttggatccctaacctatgtagggttggagcacgatttagtaaaacgggacgatctttgataacatcataaactattccccagataagatcatcctggtttttaatcatatcttcagcttgtctgatggaagcggcaattggtctaatctcattaccattttcatcaaacttattgatcaatccatggataataaagggtttaaacagctttaagatcattagtgctgggatcccaacttcatacatcttcaattcagggccaaccacaattacacttctacctgaataatcaactcttttaccaagtaagttgtgtctaaataaaccttgttttccttttaaacgatctgttaaagatttcaatgaccgtttgtctttggaaagtgatggtttatgacgtgaagagttatcaaataaagcatcaacagactcttgtaaaagtcttttttcattgttaacaacaatagaaggtacagtaccatcttccaaaatccttcttaatcggtcatttctaatgattaccctgcggtaaaaattgttgatgtcactggtggtaaacttagcaccatcaagttggataataggtctgatatcaggggggataactggaacagtatgtaagatcatgtttttaggatgaagcttagaatttctaaaccaactaatagtttccagttgtcttaagatcttcttaactttagcatcttcaacactatctttcttggcttttcttaaagcatcatttaacctgctaaattccaagttaagatcgattttattaagcaattccaaaattgcttcagcccctattccaaccctaaaaccagtgtacttcttaatgtaattaaaagcatcatttagagaaaaggggagagagctgttttttaaactttcataaaagatttttcccttacggtaatcttcactactcttacttttaatgagatttctgaagatataacctatcacacgacgcattttttgtcgtgttgaaagtgaacccttaccagttaagtccaaaacttctttgaacttaaaaggcatgattttatcatctttgatcttacctgtatcaagtactatgtagttaacaaagtacaaaacctgttcaacctctttgtaagagatgtttaaaactaatgatattttggaaggagatggtaattcttttgacatccaaatgtgagctacaggactcacaagtgcaatatgtcccatcctttctctacgtacaatagattcagtaactcacaccccacagcgatcacacctcacaccacggtatttaatctttttgaacttgccacaagcacattcatagtccttaacaggtccaaagattgcttcatcaaacaagcctccaggttctggttttaatgatttatagttaatggtttcagcttttgtaacttccccttcagatcagttcaaaatggtgtcattggaagcgatggaaagtttaattgctttaatgtttttataaagcttgttatttcttttattacgtcttgttgttgtcattgttaatttctaataaccctcagtgtcaaattcaaaatcattgaaaaattcatcttgttccccatcactttgcaagatggaaacattattggagtcttgttgggtgttgtcatcatagataaatgaaacagataaagccaagccctgtaattcttttgtcaataatttaaatgattcagggataccaggctctgggaaagctgcacctttaacaatagcagcataagccctatttcttccttgtacatcatcagatttaatggttaaaagttcttgcaagttataagcagctccataagcttctaatgctcacacttccatctcaccaaaccgctgtccaccattttgcgatttaccacctaatggttgttgagtgatcttagaataagggccaacagcacgagcatggatcttatcatcaaccatgtgattcagcttcatcatgtacataattccaagtgaaataggtctttcaaatggcattccactcctaccatcaatgagtttaaacttaccctgatttttttggggatctaatcctgcttcttgcataacatcttggagatctaagaagttcactccttggaaaataggggttgcaattttgtaaataagatcatcaaaagacatccctatctctttcaaaactaaactaatgtcactgttatcgagtttttcaagtgcttctttttcacttttaatattgcgatcattgatttggttttttaaacctttaattaatctttcaacccttgcttgaggttgattgatttcaatggcaaactccttagctttattttgatcaaaacaactactaattaaagaacgaactgctagcttgtgtgctgcataacccaagtgggtttcaaaaatttgtcctatgttcatccgactaggaacaccaagggggttgagcagaatatcaactggggttccatcttctaaatggggcatatcttcaataggcaccactttagaaataactcctttatttccgtgtctaccagctaatttatcaccaatttgaatcttacgtttttgaaccacataaaccttgatcatttcaatcacaccatcattaagttcatcaccattagcaattgaaaaacgttttacagctgaaacaataccatccccaccatgggaaactttaagtgaagagtctctcacgttttgaacactttcagggaagatggctttaaatagcttttcttcaggagagacttcgacttgacctttaggggaaactttaccaaccaaaacatccccttctttaacttcagcacccaccataatgatgccattctcatcaagatagcgtttgtttgcatcactaacattagggatatcacgggtaatttgttcatcaccatttttagtagacaaacattgagcaacatactcattaatggttaatgaagtgagaatatcttccttaactaatcgttctgaaatgacaattgcatcttcatagttataaccatttcaagttgtaaaagcaactaaaacattctgtcctaatgccaactcactcttattaacagcagggccatcaacaatgatttcatccttattaaccctttggcctatttcaacaattggtttgtggttataacaagtattttggttggaacgttcaaatttaactaggttaactgtctcttttttagaactatcacttgtaataataatcttactgttatcaacataactaacaacacctgagcaaggagaggacattgttaaacctgaatcactagcaattttgtgttcttgaccagtacctactgcaggagcatatggctttattaaaggataggcctgacgttgcatgttggttcccattaatgctctagctgaatcatcattttccaaaaaggggattaaagaagaaccaatggaaacaacttggtgtggtgctacatcaatgtaatcaatctttaaaggatcataaagtccttgcatagatcgatacctaccaataatttccttatctaagatcttgttatcgttactaatattgacaagtgaagagatctcagcaataatatgttcatcttctctaagcgcagttaaatattccacctcatcagtaattaccccagctttgattttgcgataaggtgccattaaaaatccgttttcatcaatcttagcaaagctagctaaagacatgatcaaccctatgttcatcccttcaggtgtttcaatagggcaaattctaccgtactgagaataatgcacatcacggatatctaaattagggtcctctcttgatattcccccaggtcccattgctgaaatccttcttttattactcaattctgataaagggttttggtggtctaaaaattgggttaattggtgggtattgaagaagtctttaatcacaatttgaattggttttgagttgattaaagatttaatagttaattcctttttttcaccttgttcaataacctgaccctcttcattaatttgctggccacggttaactccatcagcaatagttaacttttcttttaaaaagcgctccattctagtgaagccgctttctaatttagcagtaattaattcattaattaacttaacccgcttattaccaaggtgatcaatatcatcatatttaccaattccataaggtaaattaatcacataactaattgaagcgatgaaatcactgagagtcattgctttgttcagatcattttcgttatggatccctataactggtactgaaacactaagattatcattagtgatatatacatctatcgtttcataaaagagtgattcttttgctaaatcaacagccttaccatcagttgtaagttgcattttattaacaaaactaatttcattgttcttagcagcttgtttgattttgtcaatctcttcttttaaaagtaaagtacctttttttaaaagtagcttgccatcttttaagaacaaatcacatgccagagttttttgataaatacgttctgttaaacgtaactttctagatactttgtatctccctgcattagagaggttgtacctcttgtttctaaaaaaacgcgcacataaaagtgcatggaaactcacttcatgacactcttcagtgttttcaatatcacgcagtgaaatagaaagttcattgacaatgtgtttagcagctctttcagtaataacactatccattttgttttccatttccagttcaagtgcagttaaactagaatcatttggacttgtttgttttagcgcattatattgtttctcaagcgttacatattcattaacaagtgatcttaatttctgatcagaagcgatcccttttcttcttaaatcagttttaccatctctaaattcttttaaaaggtttttgatttcaggatcaacattgcttaaaaaatccttagcattgtaaatttccgcttccaatgaacgtttgataaattcattgtttttaaagattttaaggatctcacgattatttaaaccaaacgcttttaaaagtgttgtaatagggaaaatcttagcaccttctcttaccgcatctcttaaaagaatttgtacaaaagcatcttcaatcttttttttattggagatgtatataagcatcactgaaccattagcaggtaaaacctcacaaacataaccttcctgtactcttttacgggagttggatagttttagttgggattttgttagcatgtatatccctggagaacgggttatttgggaaataacaaacttttctatcccattgataataaaaaccccatcatgggttattaaaggcatgctagctaaaaatacaccatttgtattgctagcaatatttttctttgatttccgtgcttttttaactgttcctttatcattatcaactaattcaagatcagcataaataccaacttcataagttttagattgagcacgtgattgtgcttcatcacgttctggttcagttctgtgtaatcccctaaaattgatagtgtagcgatcattaggggatttgattggaaaatatgaggcaattaatttttcaagatcatgatctaagaatttttggtagcttttaatctgaatatcagctaaatttggttggataaaattggtctcaattttgccataataccttctggtagctgtaggggaataacgtttttgaaagaaattagatttttgtgacatttgtggggtgaaaagcggatcaaaacattaaaaagccactaacagcgttataaaacgcatgctaatggacttaatcacagttcgctaaattatattaattttttaacttgttcaataaaaggcttaaaatcaaagttctcatgataaccgttgactaaaactgttcctttaacattaagaccgctaaaacttaaaaatttatctagtaattctagaacagttttacccccacccgcagttgctggagttacacaacaaataactccattaagaccttttaaaaattgatttctaccatactgctcatcacgagtcatccagtcaatgatgtttttagcaaaagcagggataaaaccgttgtgttcaggggtaacaaaaattaaattgctatgttctttgatttttctaactaaagttttaattttgtcaggaaagttagttgcttctaaatcaacagaataaaaatcaacttgatagtcttttaactcaatcaattcacaacttaaagaatgttttaattcattagcaaatttcctgttaatggaatgttgcgaattggagagcattaaaattaatgacttttgatcttttgacataaattaacacttaaattttaaataaaaagtatttaaaaacaatttaatagaagcgtatagctatttttttcaatgttgttaattattgagaaaatagcaaccttgataagtcttaatatcagcaaccttagtatctaaactaacggttggtaaattggggttttgttctttatttccttcaagtaaacagatacaattctcatcaaaattaaaacctttcattatttcaacaattaagtggaattccaaatcaaaaatcaaagcatcaacttttaatttagtaggagaatttgaaaatacttgtaatttggaataatgcagtaaaaactgctgattaaaatctttaacagtttgttgtcaaattaagttcttttgctcaaagttaggatgcttaatgttttctaaattttttaacaagtatttatgaggcaagataaaatggctggtgatttttaactttttttcaattgtgaatctgtcttgaaaactagtgaaactaaaatcaatgttacttttttcaaagttagtttcataaccaaacacaccgtttagttcaacaaacattacgttatttttagacttgtgctttttttctaattttctaactaacttaaaaaacttattttgaaatgatcttaaagaataaacttcatgttttattttttgttttttaatttctttaattagcgaatcagaaagcttaatagttgttttttcttctggtgaattaattaataaaaaaactattttcaaacccttaaaagttttcagtatttttaaaaacttattaatttctgtatctgtatttttggttttttcaacaaaagcaaatacagtatcgttttgacttttatttcttaatgctaaaccaaatgcacttcacaagttattatcaaaacctaaaaaagggaagttatcaaaataaatcttttgatatattggaagacttactttgttaacaagcagataatttacttttttagatctaactaaaaaattaacaaaatctagatattgtaatgttgataaaagtccaaccttattgctattttgaaaaaaatcataagctaataggcgttgctcattaacgagggtttgatcattaattttatgagacattgtttaataaattttacttagtttattatgattcaggatatcatccattgctttacaaaagctttcatatttactattaaacatttggtgttcactgtttaagataacagatgattgcaaattattgttcttaattaggtatttattgaaatagcttaatgttaattttgttggcataaataaatcattttgagctaaaaccaaaaacactggtaactttaaatttttataagtcttatttaaaactggtagttctttcaaaatattattagaaagctttttagccattttactgtgttttgacagctcattttctcagctgttttcatcagttaaattactaaatttagtttgaaacattgctttaaaattagccattctttctgccttatcttttttaaaagaacttttaattttgaaatatctcaataagttacagtatgaaagaggtgctaaaagtatgagtttttcaacacgtttagcatttaataaattcatggcataactacaaacagcagcacccatactgtgtcctattagaacgatgttttccagatccttattttctataaaagcagctaatagttctccataatggattggagataattccttataatcaaaaccatttacattatgaccaggtcaaagtggagcgtaatagtcataatcagtaagggttttataaaaactttgaaagtagctatgaaaaacagaaaatccatgtgcaaaaacaaccgtttgtttttttgttttttttgctggctgaaagaaaacttcaagcttagaaatatcaatctgattaagatctgaaaaccttttcacaattatttttttaacacactttaaaacaacgtgagcacaaattatgatctaatttttgcttaatgattgtttgaaaatttcagcatctttcacacattgtttttttagtttttttaactttaatttcattttcattatttgttaaattaacactgtttacattaagtcaaagtgcgagattatcctttaattttttgggtatttttttattaattccaacggttaattcaatttgattatttttagaaatcaacccttcttttcttagcttttcaatttctttgaaagcagcatttttaatactagtaaaagttttatagatatttcctaaattcttagagttagcaactttaaaaacagtcggttttgtaaagaggttcacacttattggttttttattgaatgaatagttttttcaagcatcttctgcagtgtggggaataaagatatttaaaaaactgattagttgtgtaaaaatatagtttaaaacagcttgtttagctaaacgattaggattatttttagcatcacaatataaggtgtctttaattatttcaaagtatcagcttgatagtcataaaacaaacttattaatcacttttaggcaacctaaaaaattatatttctctaaaaatttctcaatttgttctactagtgaattagttttatggataactattttgtcttctagtgaaaacttataatcatccattgatgtaaagttaaatccattaatattacccaaaataaaacgtagtaaactatttctaattctgcggtattgttcagcaacttgtttaagaatattaacacctattttgttatcaatttgtcaatcagtattagcaactcacaaccttaatatatccgctccatattgatcacaaatttttaaaggatcaactatgtttcctaatgactttgacattttattgccattttcatcaagtgtaaaaccatgtgaaacaagtgatttaaaagggattaaatcattttgaataattccgcaatttgaagaagagttgaaccaaccccgatattgatcagaaccttcaatataaagatcagctattgaaccatatttatttatttccaaaacattataggaagaacctgagtcaaatcaaacatctaatgtatcaatctccttgtgatacttaactcattttttggttttatcaggttttaaaaaacaagttacatctttttcaaatcaactatcaataccatgctttttcaattgtttaattgtgtattgaattgttgaaaaatctaacaatggtttgttatttgcataaacaattggtataggcaagccccatactctttgacgtgagatacatcattcatcacgttgtaaaagcatctcttttaatctcaattgattttttgaatttaaaaaattaacttgattaatttgtttttttaactgcttttttattgatttagttttaatgaataattgtttggaagcacggtatataactggagtttttgagcgtcaatcatgtggttcgcggtgggaaataacttcagaaaaaataaagctattgttttgttttaaacgattaataattagatcatttgctttaagataaaaacaattctcaagttctttatcattaagtaagttattaaatacacctttctcatcaatagaaatcaaaacttctttaatcttgtttttttgacaaagataaaaatcatcaattccaaatgcaggggagctgtgaacaatacctgttccctcattatcaacaacatgtattcccattagaactggtaaaaccttgttataaaaacaatgagaatagcttgaattttttaaatttgaacccttgaatttttttagtttaattgcatttgttcaatttaacttatttgtaaaaacttcaaataatttttccaagataacaaatttttgttggttatattcaaaaagaagataatcaaaatcaggatgaatggcaattgcttgattagttggtagtgttcaaggagttgttgttcaaactaataaattagcattttcatctaaaaaatcacttttagaaactttaaaagttaaataaagtgcaattgaattaacttctttatattcaatttccgcttcagcaagtgaagttcttgaaattggtgatcaataagttggttttaaatcttgaaaaatgagcccttttttaattgcttgtaaaaatagttcaagttccttaaattgaaaactctcatctattgtgtaataacagttttgaaaatcatttaaaagtcccagtctttgaaattgttctttttgaactgcaatttgtgaaagtgcaaactgatgacataattttcttttttcaacagttgaaagattgctataactactagggtttttcttactaactgcatgttctattggtagtccatgacaatcccaaccaggaataaaaacaacatcatatccttcatataaccaactacgtaaaatgaagtcttttaaaatcttgttaagagcatgtcccacatgaatactaccatttgcataaggtggtccatcatgcagtatttttatctgttttcctttattctgtttttttaatttttgaaagacttttttatcttttcaaaaatcatgaaaattcttttcactagtagataaatttgcctgcatcgcaaaggatgttttaggcattaacaatgtcttttttaagtccattaaatcagagtaattttattaatatttatctaacttacatctgatgtataaatcagtaataaacatagttttattttgtccagaaattcctaataacactggcaacatcgtacgtagttgcactgcttttaaagctaatctacacttaattaaaccttatggctttttcttaaatgataaaaggatggttagagctggtttaaattgttgagataaaattcaattatttgaacacaaatcatgagaacatttcttacaagcaaccactgaaaataaaactatttggcttttaactaaaagtggtgataaaactcctgatcaaatttgcatgacaaataaattaccaaacgaactttactttgtttttggtcaggaaacaaagggattacctaaaacaatcatggataactttaaacaaaaccaaattagaattcccatttgaaatagtgttagaagtattaatcttgctaatgcagttgtctgtattttgtatgaatattcaaagcaaaatcaatactctaatttagataaacagtgcgcttaagaaaagttaaaaacgctcttttaaaaattaatcaaagtccttatttttattcaaaagataagtttgctaagtttactaaaaaacaattagtgctggaattgggttgtggtaagggtacttttttaatcaaagaagcacaaaaaaataacaattttctttttataggaattgaacgtgaacctacaattgttttaaaagcaattaacaaaattaacaagttggattttaatttggaaaatatcttattgttgtgtacagatgcaaaacaacttgatgattattttcaagctgaatctgttcaaaaaatctttattaatttccctgatccttgacctaaaaagcgtcatatacaaagacgtctaacaagtccagattttttgaaacttttttgaaatttactagtaaaaaatggcttaattgagtttaagactgataatgataagttatttgaatatactttaacaacattgcaagaaaatagtcaaatttttgaaattatccatcaaataactgatcttaacaattctgaattcagttttcaaaatagtatcactgaatatgaacagcgctttatggaattagaaattccaattaaaaaactagtgattaagaaaataatttaattaaagttattagaataattattagcttgatggcgattgtggcgaagtggttaacgcacctgattgtggatcaggcattcgtgggttcaattcccatcagtcgccccattaaagattcaaagagcagcagttagctgcttttttttattagctagtttagtggagtataaacactatccaagaaatttaaaaaatcaacactaactcttactgcgtgttgtttaattccataagatttttgtgatctttgaactgctggttgagaagattgtggtgaagtaggagtagtattttgtccattaccactacttgagtcaccacctgaactgccatcactaccgcccccttcaccacttgaagctggtggggttgaatcaccctgacctgatccaggtgcattaggatttgtagagttatccaaaccataaaaattagctcttatcttattaaggttatcttttctaaaagcaatcacaattgctttagttacatcattaccaactgtttgagcatgcacatttgattgattgattaagttagctacattaccaccataagtacgttgaataaaatcaactatttctctatagcgaactgcagaagcatctgatcttcttaacttattggaattgtctttatcttcttgacttgcaagttcgttttttctatccacaacaggaaaacgtgcatatgggtttcactttactgaaccaggagcaatatcattccaaattaaaaatttaactccgtttggataagtagaataacggttttgcacctgtctgatggtggtacccaaggtacctcctcaactaagagaacttgtaccttgattagtagaaccgtttagaaaattaatttgggaactatctgtttcggttgcaataacaaccacataattaccatcgttatatgatctggttccaaaaactaagtttctaaatgttgtactgttaacaggcaattggttgtaagctgtatttttttccacactttcaacagaaagttcacgaaaaaaagactgatcgatgttactacaagaacttaaaatcattcctgttcctagtaataaaactaaccatgcttttttatgttttagatttcaaaaaagacgcttcatttctaaattgactggtgtcggagaccagacttgaactggcacagtctttaacgaccacaagcacctcaagcttgcgtgtctaccattccaccactccgactatttgcttgtagttaatattgtttatattaataaaaattttaatacaagagttaacaaggctattagcttgtactagcttaaactaggaatataaaggtgttatttcaagctaaattcccgcttttttctccttaaattcaactttttttatccgattattggtaaataaatcagtttaaaaagttattaacaaaatgtttataagtctcaaaaaagggttgttttagactgtttttaatgtcaataagttgtaaataaatggcagaaaaatctttttttagccttttaatgcaaagtaatttcaataaatggaggatagcgtcttatactctttttacttttgaacgtatatgcaacccaactattaccgtgtgatcaaaaaagcaacatcattttctggattagaaatgatctctcatgcttatggtcaaattgcgggagtggaagttgttgggttttatttatgactaataacagaagctaatattcaggcgttcaacagtgaaattagaacccccatttcacgattacaaaatgcctttaatccttttgaaattaaaaaaaaccaagtctctgaatggatttataaaactattagcaaattagagagtcttggtttagtgagaacttttttttcaccaaaacgctctgaaataactttttgtattattgatcctttagattggaaagaatttaagcaaaacaaacaattaaaagaaaaactagttgaggcaatgggaaaagttgaatatgaccgaaactgcttagcttttgatcaaatcgacaatcttcaatttgataatgcgcttgaaatctctgctaactttgaagttaatttcactgcaaaccaaagcgatgtttgatttagctttaacttcgaggaactacataaagaacttgtaaaaaacaaacttttaatttctttagatgaaaaagctaagactttaattaatggttattttgaaaaatacaagctttcattgcaacaaattactgattgcatcatcaacagtagtactcaagagaatgagcttgattttcaaaagttagaaatgatgttttttcaaatagtaaaaaatgatacagctcccattttagaaacagtttcaaacaacaaagactttttttataagaatgaaattttagatgaatcaacaaaaaaagcaataacagactgtcatgtaaacttcaattctgaaaaatacctttttcttctatatggaaagatagatgaatcgcaattgcaattagttagacaattgagaagtgattatcaactattagataaagtaattaatttagtattagacttttccttttgaaaaaataacggaatgtgaagagaaaaatacattctaaaaattgcccaatccatcaaaattaataacagtcaaaacagttatgaaaaaacccttaataattttattagagcactaactttaaataaaaagcattctttaaataatataaaaccagttgaaaaaacaatttcctttactgagtattttgaatttattaaataatgaaaatttcaccagatcaaaaagataaaaagtcattatttaaaaaacattttgcttatttgaaattaactgaaaaagaacttaatgatcctaagatacaaacacttttagaagttgcgtggaatcattttgatcagtgtagaaaaattaaagaaagaagatgtagtaataaaggtgatatccatcttcaagctgttagagagtggttaccttgagaatttaacgctaatcaacttaaaaaaaatagtacaaaagaaacaacgcaagttagtgaaaatgaatttatgggtaatgttatgctcatgcaaactatttgtcctaaattagttaataaagcaaactgatttgatttaacttatgagcgttttattgttacaaaaccaaactgatttaaatacatggatttgattccaatgatccaaaatttaccagtaactccaagtgataaaaatagttttggttatgcatacaaaaagatatctaatctttttgaaactgaaaagaaaacaaagaaaaggatattttttttcaatttacaaaagaataacattaacaatatggcagcttgtatgttaacttgtgaaatagctaagaaaaatataaaagttgctttaatttattgtgaagaatttgttagcagatatgacaaaagttattgaaaggtagatgatgatttaaatttacttgatgaggcaaaagtaatcatattcattggtttaggtcaggaaagttttcataacaaaaactatatcttgtttatgacaaggctttttataaattgttttttgaaaagaaaagatgttttcttttttagcactacttatagtgatggtaatggattaattcaaacatttaaaaaccaaattattagtagtgcaaattgagtaaaacacttttttgaacaacttaatgatttattaatgattaatatttaaaaattacattctttcaccaataaatagctaagtttatgtaaaatttatcttgtattacctggagtggcggaatggtagacgcggtggactcaaaacccactaggaaactgtaggagttcaagtctcctctccaggaccataattaaatacttaaatttacactacgaaattacaagctcagtttaaagctgagcttgttttatttttatagtgatttctatttagctaatgctctttttcaataaaacttttgaaaggaacgcataattggcactccaaaacaactaacaagtccaaatttcaccaaattaaaaaacgaatataaacagaaaattcccagccaatagttattaattccaaagaaaaagaaatgaaaatcagtgttcttgttatattgttcagcaactattaaaaagttaggtgtttgaacataaccaaagtagtatcaaaacaaaggtgttatcaaaataccgttaagcgttgttagtaataaagcattggataaggttgtaaataaaaacacaaagattcaacaaaatcttctttttgaaaataaacaaaaataaagccttgtaaataagatagtcgataagttagctaaagttacagttagaacaccaataacattattagtatttcaaaaaaaactagttaaagcagaagctaatgtaattgttaagcttcaacctagtgacacaaaaaaagcacatgcaactaaaaaaacaacggaaatatcaaaagttagttttagttgtgagaaaaaaggaatactaataaattcactaattaatgatgtaatgatggccaaagcaagcatcattgcactaaaagtaatattaaataactgatggtatgatttttttggcaaaaaaaccagtttattaccattcattatttaaaagactcttgaattattagttaataataatatttattgatatggacaaatttttaattgatgttattgtagaaatccctaaaaacagcaaaataaagtatgagtatgatcgtcaaactggtcaaattcgcgttgatagaatcctatttggaagtgaatcatatccacaaaactacggttttattaaaaatacattagattgagatggggatgaacttgattgttttatctttgcagatcaaccatttttgcctgcaacagttgtgcctacaagaattgtaggagcacttgagatgattgatgatggggaaattgatactaagttattaggagttattgattgtgaccctagatataaagaaattaatcaaattagtgatttacctaaacatagaatagaagaaattcttatctttttaaaaacttataaattacttcaaaaaaagactgtaattattaagggtttaaaagatgtttgttgagctaaaaaagaatatgaaatttgtttgcaattaatgaaagattatggtcatttatcaaaagatcaatttatccaaaaaatgcaaattcttcatccagaacattaccaaaagtaaatatgataaatgccaatcgcggaatgcttttagagacaattgttaatcaaacaattgctaggttaaaggatcatccagatatttgactggaaaagcggttcttacctattaagcctatagcttttcgtcatgctcatgtatctggcaacgtatcacaaaaatcaaaaactgattattatggaatttacaagggaatgtattttgattttgaagcaaaacaaacaaataaaagtaattttccaattgctcaaatagcagaacaccaattaaatcatttgaaaagaattgaccaaattggaggagttagcttcttgctaatttactttcaaactaaagatcaaatttttgcatttcacactaaggatcttctagaaacaataaaaaatcaagaaagcaaaacaattaaaagggaattgatagaacaaaaatctcagaaagttccactattgtatcctggtattattgatttaatttcaataattcaaagctttaaaaattattagtctgcgtactttcaacgcactttagctgcagtttctttgatcgttttgcttggactgtagcgcactaatggttttggtgggatatgtctaatctcacctgtttgcatatccttctgataacgtgcatttctaatagtaatccttaatttacctaaattttcaggtaatatacaaacacttctacttaccaattcatttagtaacaatgtgttaaggtatttaaagatttccttaatttttttttcttttataccagtagcaactgcaattattttattgatttcactacgagaaagtggcttacttgtatttgatgttttttccatataattattttttaaaactttattagctctgttattgctaaaaacaaaagagaaacaatttaacgcattctattttattattgattcaacaattaaattaaaacacttataaagtaaatttttagacaattatttctattcttaagacatggaacaaaacaatattaaagaacaacttatttctttctttaatcaagcatgttctacccaccaagaaagacttgattttatctgttctacaagagaaagtgatactttttctagtgttgatgtaccacttgaacccattaaaaatattattgaaataactaaagatgaaaatcaacaaattgaaattacaaaaatagctgttaataacattaaaacattatcttctgttggtgcaaccggtcagtatatggcatctttcttttcaacgaatagtgagccagctataatattttgcgtcatttattttttatatcactttggttttttaaaagataacaataaaaaacaaataataaaaaaggcttatgaaactattgctgataacattgctgactatttaaatgaaaattaggtttaagacttattattttgtgtaatggtaatattgtctttaacaactgcaatgttgtatccaacacctttttttatctttccctgaaggatatatttagctattaaagttgcaacactatgatcaataaagcgcttaattggtcttgcaccaaactgttgatcaaaactacttttatagataaactctgttagatttgaatcaaaattaaaaaataaattttgtttattcaagcgttttgaaagttgtgccaacaagctgttgattatcgataaaactgtatctttctcaagaacattgaaaaatactatctcatcaatacgatttataaattcaggacggaaatgtttctttagactttgaatggccaaatctttttttccttctaaaagaaaatttgaacctaggttagaagtcataattatcaaagtatttttgaaattaacaacccttccttgtgaatcttttaaagtaccatcatctaaaacttgtaataaaacattagttacatcaggatgtgccttttcaatttcatcaaataacaagacgctataaggttttcttctaaccgcttcagttagcaaacctgattgttcataacctatgtaccctgggggtgcaccaattaatttagctactgaatgtttttccatatattcactcatatcaaaacgaatcagagctttttcattgtcaaaaagaacttctgctaatgatttggcaagttcagttttaccaacaccagtagaacctaaaaagatgaaagaaccaataggtttgtttgggtcatttatatttactctacctctaattacagtgttaacaacagcatcgatggcttcatcttgtcctttaactctttttttgatttcatcacctaagtgcaaaagtttatccttttcactttctaatagttttttaagtggaattcctgttgtttgtgaaataacttcagcaatttcattttcagaaacttcagttttaaataaatcgtgcttagaagttgcatatttttgttgtgcactttccagttcttttttaagtcttgggatatcagagtacagaattttagatgcactttcataatttccttcactttggtatgtctctagtttggtttgaaattcttcaatctcttttttgagcttattaatgttttcaaaatcagccttttccttttttcattcatttataagtgaatcacgcttttgtttaagagcatctaattgtttttttagtttctctaaatattctttctttgattgtttgttatcattttccttatcttgtttaagagctgcatactctgtctcaagattgattatttcacgtttaagactatctattgcaactggttcagatgacatttctgttttgatcttagcagcagcctcatcaataagatcaatggctttatcaggtaaattacgttcattaatataacgagttgacatttcaacagcagctactaaagcactatcaaaaatagtgatgttatgaaagagttctcaacgtgtttttaaaccacgcataattgttagtgcctcttgactactaggctcgttaataagaattttttgaaatctacgttctaaagcgccatctttttcaatgtattcccggtattcttttagagtagtagcgccaattacttttatttctcctcgagctagcatcggctttaatatattggcaatatccattgcaccactgctagaattacgtcctaatccaactatttggtgaatttcatcaataaaaagaataatcctgccatttgattcttttacttgcttaagaatggtattaattcttttttcaaattcaccttggaatttagtgccagcaattaatccagaaagagatagttcataaatttctacatcccttaaatttaaaggtacatcattactaacaactcttctaacaaaaccttctactattgcggttttaccaactccaggttcaccaattaaaacaggattgtttttgcttttacgacttaatatctcaattaaacgacgaatttcgttatctcttccaataataggatcgaccttattttttaatacttcatcgttaatattacgaccaatttcttgcaaaaaattacgattttcaccagcaggtgtgaaattaatattcattttaattgctcactccttttaatgcaaaaattatataaaattagcactcaaggcattcgagtgctaattaaaaactaggttttttgtttatctctaatttatctaatcagagttgatatttttgtcaaaataattagaaacctaaaataactattaactatttttttgtgcttgttttcaaattgagggaaataatgcttttaaaaagtattctaatcgtttttcaactcattttcgatagtttaaaattgcttctgtttggggcataatctcagttcattgaaaagcaaataataaaacataaataactgtttcaaaaacaagcttacgcttaagtccaccataaatatcaataagtttatttgctgtttctatggttagttcttcacgaataatattagctatttcataataaggattatcaacacaagatcattcaaaatcaataaggattacttgctttttaggtgttcaaaccaaattatcaaaagtagcatcatgatgacagagagtttttggtatgtcaatatgcttcttagttaaattaagatataaccgtttataaaaagcggaaagcttagttttttcaaaataaaccaaaggatcaaatattaaaagttcattagcaaatggttttcagtcaactgaatgaactttttttaaagattcaaccaatctgcataaaaatagatcagttgctcttttaggttgagtgccttctatccacctttttatagcattacctgttgttacatcaaaataaacaaatgggtttgaaaaaaaaggttctactagttgcaaaataatttgttcatttcttctgtctaaaataacatcttttcttgaaagtcttatttgaaatttactatgatctttcaattcacaaaaaaaagaaaaattagtaaaaccagaatgaatttgctctatcttgaaaatatctgtttctacaacttgaagtttttcacaaagaaaagcaaccgctttttttaaatccattaattttgatgattattttttaatgtttgtacttactctcaaagcatcttctacaatcatcaattcctcatttgtacgaactctaaaaatttgatacttgctttcatttgttgaaattagagaactatcttgataatttccaaataaattactgttagttttaaaaccaagtgaagcaactttttcaattattaattgcacacaataactagcattttcaccaactcccccagtaaataccaagctatcaatttcacctgaaagttgatttaggtatttagcaatatagtcagcaacacgattaacatacatttttatagcaatatcattaatttctggtttatcaaaaatatcacgcatgtcagaactacctgttatagcaaacattccactctttttatttaattcatttacaacatcattacatgaaagcttttgctgttcagcaatgtaactaacaatggcaggatcaatatcaccactacgtgttcccattattaatccttcaaggggagtgaatcccatcgatgtgtttagtgatttgccttgtttaatcgcacaaacacttgcaccattaccaagatgacaaacaattaaattaagtggttttttattaaactttttttctaaaaactcgttaatgtatttataagaagttccatgaaaaccatatcttcttactaagttatttttctctcaattttcaggaactgcataaagataattttcccttggaatagtagtgtgaaaagtggtatcaaatacagcaacattcttagcagtttttatctcttttagaaaaatttcaataacatctgcttctggtttattatgaagcggtgctaacttaatgaattcttttatttttgctagtgaatgtgtatcaacaagaactgcatctgtaaaataatttgctccttgtactactctatgccctattagcccaatttctgaaagttcagtaataattttgttttttttaagcgcatttaaaaaatgcttaacagcaagattatgatcattaaattgaaccttttcttctatctttttttgattaaattcaagcttaaaaaaaccatcaatgaaaatacgttcacaaagtcctttagctagtacttgttttttatcattaaaaagttgaaatttaattgaactgctacctgcattaacaaccaagattttgtgactttgcatttaaccgaagaatatttaccttatttattaaaaaataatactaaattaatatagtgtggaataattaaatgttttaactaaaaagaaatattattaaatcttaaacaatgaaaattaaaaaatgctatattatcgctgttatttcagcttttattggttttcttttttactttttatcttcacttatagggataacagatgttaataatgcaaaaacagtagcaactgtattttttgtattagcaacattaatagttgttaatgctattgtcttctggattctttatctattcaaaaaaaagaacgtagttaagtaaatttatttgtcactaatagttttttagcacattaatttgatagaaaacaaattgaatgtaatatggaaactatcagagaaacactttcttctatacaaagaagcaattttttattaaatgaaagcgcacaaattctcaatacgtgtgtaaacaagaacacattgcttgacgataagctgcgcaattcgattaattttgcacttagcatcattaagctagcagacttttgtctaaaggatgatactgaaaaaattaatcaattcttaggtaaaacatatgatttaccatgagagtttcaatttaaccaaaaagacaagcatatagaatgcactgtcaaagacaattttggtcgtgagaaactaataaatttgatttttcaaattggtgatgctattgaaacttatcatactactttaataagattcaaaattcccaagcattgtttgaatgcaagggatcaaatcaaaaaaataatggagggcaaataaaaatgattacatctatctttggaaaagttacttttgtaggcaaaagaaaaataattgttgagcacaactggatttcatattgatttaatacaaaagaaaaccataaatttgaaaaaaatttggaaaaaaataagcaaattttttgtcatattattaaaaaaattgtcgctaaccaaattatagaagaggcttttgcctttaatactctagaagaaaaagagtggttctgtagattaatagaactcaatggtattggtagtaaaactgcacttaatttgctcaataatgaccttgaggaaattaaacaatacattctggaaaataactacagtgcattatgtggtattaacggtgtaaataacaaaatagctcgtgcacttttatcacttgaaatatttgaaaaatctgaaaataataaaaatattaaaggagttcaagttgctgatggttatgatgaattgtttgaaacactaaagtcacttggttacaaacaacaagaaattcaggatgcactaaaaatgatagaagtaaaacctgattttgatataagtcagttagttgcagaagtaattaaattaatgtcttttaagaataatgaaattacaaataaaaccgcctaatacctttgatgaatttgtaggaaaacaagaaataattagtcaaattcaattaagtattaaagcatctaaattaaataaaacacaactagatcatatcttgttatatggcccacctggtgtgggtaaaactactttagccagattaatagcaaatgaattgaaaacaaagttgcaaattattcaaggtggacatttacaaaaaccaagcgatttcttaaacgcaatttcactcattaaaaaaggtgatgttctttttatagatgagatccatgccgtagcacctaatgtcatggaactaatgtatccagttatggatgtgttcaaaatacaagtattaattggcaaggattttaattccaagatagttgaaatgaaggtaaatccttttactctaattggtgcaactacacaacttggtaaaatcatcaatcctttagaagatagatttggcgttatcttaaacattaactattattcaaatgctgaaattgaaaagatggtaagtatctatggaaagcaaatgaagttagagctaaattcaaatgaaatttcagctatcactgaacatagtaaacaaacaccaagaattgcaattagaatagttagaagaatatttgaacaaaaaattgttaataaaaaaatagaccttgagggtttgtttaagaatttaatgatttataaaaatggtctgcaaagtattgatgtccaatatcttgaggttttaaatcgccaaaatgaaccacaaggaattaagtcaattagttccatgttaggtatagacagacacactatagaaaataaaattgaaccttttttgttgcgtgaaaatatgattcaaaaaaccaaaaaaggcaggattattacaaatagcggaagagaatatttagttaacttttaagcttattagctcttttaataatttcaaaaccaaaactttcattaatatcaaaaattaatttatcaagtgaagattcttcgcttaatttgctaattgattttggtatgaattgataaaataaagattttttctgtccttcatctgtatctatcttttttaaatcaaaaaaactaatacctattaatcgaacgttcttttcagtattaattaatagtctgttgaataatcgttttgttattgacagtagttttctataatcgtttgaatattttttcattttatttgaatgagaattaacaataaaatcattgcttttcaattgcacaactatccctttacacacttgtgaagagagttgtaatcttataaagagctgatcaaatatttgcgttaactttttatttaactgattgtttgaataatttaaatcttctaacgtttcactgactgcaaaagagcgagacttaacctgattgttattatctgtatatcatttgcctagtgaaactgcttttaaagattctcaaaaattaccaaatactttttttaaaagcgaagcatcttcacaaactgctagatcatttattttgtaaaaattatttttaaaaactaaatcaatatgtttttctcctatccctggaatttcagtaattggtagtggtcaaagtttttttttaatatccttaactgaacaacttttaattccaaatggttttgcttgatttgaaaaaatcttagcaattaaaaaatgatctgagatgccaattgaaattttgattctcaagttttgaaaaacaaaattttttatttttttcgctattaaaaatgcctttttaaatgaaatgttttgaaaacaagcaaccccttcatcaacagaaagaacatcaatttttaatgaaaaagtgctttcaataactgaaaaaatacgtttagaatgttttctgtaattacgaaaattagaatgtgcaaaaatagcatttggacatagttctaatgcttttaaaatagacattccagatctaattccataactacgagcaacatagttacaagttgaaactacacttcttgaaaagcgattaccaactattaagggttgattaactaattctggattttctaattcttcaacagatgcaaaaaaagcatcaaaatcaaaataaagaaaaattaaatttttatcaattaaatattctggttcaaaatatgtaaaggtgttaatcatatttatcaagttatgttattatttacttgcaataaaaccaaagaaaataacgagtttttaactttaataaagttatcgaggatttatcatcgtttgtgctattgcgaatattgtagttaatggtagatagtaagaaaaataaaaaacagcaggttacggatttttctaatttactctctcaaagtaaaggatttgttatttttgactattcaggaatgtctgctgttgatgcaactttaatgagaaaaaagttgtttaataagggtagtaagataaaaattgttaaaaacaatatcttaagacgtgctttaaaaactagtaattttgaaggtgttgatgaatcggtcatcaaaggaaaaattgcagttgctgttggtattaacgagatcttagaaaccttaaaagttgttgatagtgtagttaaagaaaaagagttaatgaaatttgtttgtggtcattttgataaccgtatttttaatagtgatgacttacaaaaaatagcaaaactccctggtagaaatgaactttatggaatgtttctttcagttctacaagcaccattacgaaaatttctctatgctcttcaggcagtaaggaatgctaagtaaattaaataaatagaaaaatattatgggaaaactagataaaaaacaattaattgaatctctaaaagagatgactatagttgaaattgatgaaataatcaaggctgttgaagaagcatttggtgtaactgcaactccaatagtagctgctggcgcagctggtgctacacaagaagctgctagcgaagttagtgtaaaggtaacaggatatgctgataatgctaagttagctgttttaaaactttatcgtgaaattactggagttggtttaatggaagctaaaactgcagttgaaaaattaccttgcgttgtaaaacaagatattaaaccagaagaagcagaagaacttaaaaagcgttttgttgaagttggtgcaactgttgaagttaaataaagatggcagtacaacaacggcgttctagtaaacaccgtcgtgataaaagacgttctcacgatgcacttactctacaaactttaagtgtttgtaagaaatgtggtaagaagaagttatcacatcgtgtgtgctcttgtggtatgtacggtgaactaagagttaaaaaagctcactaattcacagataaatattattgtttttttgcagttgaatttgtattacttttatgcaaaataacagcattttttgattttaaacgcttagctctgtttaaagaaataatcccttttctggctaaacgatctgcttgagaataaacagaactgagattatctaaattaatctctttattaaattttttaacattagtttttagtttagttttttgtcctttattatttaaatttctcttaatgtcttgacgtaatcgtttttcgttagatttaatattagccatttaggttattaattagttttagagtatattattatcttgattatattgtaactagaaccatatatggatggtggacaacaagggagtttttttgggcttttagtaattgttattccaataattttgttaattgtttttttttccaagaaaaaaggggcacaaaaaaatgattttagtggtgaaggaggtaatcgatcatcaagaaaagatgaagtgtgaaaaacaattaaacagtttttgcaagaaaagaatgaacgtggtaaagaaattattaaaacttttgtagctaaaaaaccaaaccctttacattcaaaaaaagaccgcaagcttttcaatcaagagatacaggcatatattactagtaataacttaggaaaaagcgaagcaaaacgttataaaaatgagcaaactcgcttaatgcaaagagaactttattgtatttattttgttacaaaagatgctaaatcaactgaagttgatgatgctaggattatagaagctgaggtttatcaaaaacctacaaaaaccaaaagtactccagagcggctaattcgtatacttggtttaaaaaattttgaaactgaaatgcaatgaattcaaccattaatggttcgtgaagaaaagagaaaagaaaaagaagaacagaaaaaacttaaattagctgcaagagaactaaaaaagaagaaaaagaagaaaataaaaaaaccaaaagaaatcagaaatcagaaaaatgtttaaaattgttttctttggtacttcaacgctttcaaaaaaatgtttagaacaacttttttacgataatgattttgaaatttgtgctgttgtaactcagccagacaaaattaatcatcgtaacaataaaatagtaccttctgatgttaagtctttttgtttggaaaaaaacataactttttttcaaccaaaacaaagcataagcataaaagctgatctagaaaaattaaaagctgatattggtatttgcgtttcatttggtcagtatcttcatcaagatattattgatctttttccaaataaagtaattaacttacatccttctaagttaccactacttcgtggtggtgcaccattacattgaaccattattaatggttttaaaaaatctgcattgagtgtaattcaattggttaaaaaaatggatgcaggtccgatttgaaaacaacaagattttttagttaataatgactgaaatactggtgatttatccatatatgtagaagaacattcaccctcttttttaattgaatgtactaaagaaattctcaataaaaaagggaaatgatttgaacaaataggtgaacctacttttggattaaacataagaaaagaacaagaacatcttgatcttaatcagatttacaagagttttttaaactgagtaaaaggtttagctcccaaacctggtggttggttaagctttgaaggaaaaaacatcaaaattttcaaagctaaatatgttagtaaaagtaattacaaacatcaattaggagagatagttaatatatctcgaaaaggaattaatattgctttaaaaagcaatgaaattatttcaattgaaaaaattcaaatacctggaaaaagggtgatggaagtaagtgaaataataaacggaaaacatccttttgttgttggtaaatgtttcaaatagaatgattacaaagagttttttccttaaaaattttgatcgctctaaagaattaattcctctttcatataacgatgtttttagcgctgttaatcagtttctgaaaagctatactgacgttaatgatattgatattattgaagaaaatttgattgaagatccagtttttgaacttgatgttttagaacttttaaacgaggatccaatgctattattggacagtaaaaatccccgtgttcaagaagctaaaattattgctaataaagcaaaaaaaaatattaaagattattttaatcttcccattttttttgatacagatagtttagataaaaatgtttctgtttatcaaaaagctgagcttactgaaaagaaaattcaagaaataataacatcaaaaaaatcagctattatttttaaacctatttttgaaatagaagattgcttaattcaaccagatgctattattgttcatgaaaaaggactttgtgaatttgttgttataaaagctacaaccaatacaaaaagaaaatattttttggaaataatttatgactttgtgttatttaaaaaaataggtaagtataaacttttaaactattatttttgtactgttaaatacgaattacaaaataaaaataatgtttctttctttttaaatactgaaataaaaacatcaaaaaacagttttagtttaagttcaaaagaaaaagattattttaagaataaaccttttaatcaccctgaaaaaattgcttacatacacaaaaaaaagagcaatggagttaatggttttttgattgtaaaactcattgataaccttattaaaaacaatatagttgatttaaacaaaataagtgattttgttactaaagaaattgacagtaaaagtgttcgtaatattcaaccacttattaaaaatgcggctaaaatacaaattaatttttgagatcaaatacaagatataaaaaaatatcaagaactcaaaataaatcaaattgtttttaattacagtgaaaattttgattctttttggagtaactatttattaagaaatttaattaaattagtttttgctcataaatacaatgaaatttttaaattatctggtaaattagctaattgaagtcaattaacatatgcatataaagaaaataaatcaataactataaatcaactgcttcacgaattaaatcagaaaaaaagcaaggctaattttaataactcaactaataaaataagtttttttcttgaagcgtgaaatagtgaaaaaggttttgcaattggcaataaatttaaaaatacttgaaataaacttaaaaaaaagaaagtttattttgattttgaaacaattagttcatcaatcagaatcataaataattcattaccatttagtcaaattgttacccaatgctcattaatagttgataaaaatgaaatagatgataaaagaaaacttaattgtgaaaatctaatttttgatcccttatttattagcgttaatgactttaaaaaagtaattgattcactctatcaaaacaattgcagtgattatagttttgttgtttttaataaatcttttgaaaaaaacagattattggaaatggctacattgattaatgaacaaatatataaagaaaaagtaaaagctattgttgacaatctttttgacttagctgatatttttactattgaaaataactgtttggctttcaaacagctaaacggtttttcctctatcaaaaaggttttaactattatagatgaaagctttttaaaggcaagtaaatcaattggttatcaaaatttaaaaatccaaaaaggtgatgtagcacaagaagttgctttatcgcgttttctaaattgcttaaataaaaatgaatgaaatcaagtagcttttgaattaaaaaaatattgtgaaaatgatgtcagagcgatgatttcaattgttttatttatccaagatttaatcaaaaaaaatgatctatttactttttattcagaaaattagaacctgcttttctactatttcacctaattttttttaggtttaatagctagtttcttacacatcttttgattttctatcttctcttttaaatcactaaaaaaatggcttcctttactactttttaaaaaacttgtaaaagaagccattgcgttgtgctctaaaacacttttatcatcgtaatttttgttatttgggatagcttgtgatcaaataatatcaccatcaagttcaattatactaagtaccaaattatttgaagttaagcttaccctaactcttggttcaggtaatttttgctcttgaaaaagtgaaaagaaatcgtattttaaaatctcagaaaaagttctttcaaaaatatatttttcaacaaattcagttgcttttttcatccccatatcttcataaatggcgccaaccaaagcttcaagtacatcaccaacagtgttttcagttagttcagcaccattgcttaacttaacaaaatcacctaattttagctccataccaatacgattaagattttcacccttaacaatttcaatcttagttcttgttaaaagaccttcgttatatttaggataaagttcaaatagttttttagcaacaacaaagtcaattaaagcatcacctaaaaactctaagcgatcgtaactttcactaacatcttcatgttcattgatgtaagaagcgtgaataaaagctttttcaaaaaattctcaattattaggaaaaatatctaaattctttaaaaaagttgctagttttttatcaaaaatcttattattttttagtttcaaaactttattcttcatagttattcaaagaagttttaattgcattaataagatcagattttaagcttagatgtgctaatctaatcgtgcttaaaaattgttgtttatcagcagaaccgtgagtttttaaagctaatttatttaaacccattacaacagctccagcgttatttttgtaatcaaattttttggctacacttttgataatacctaagctaaataagccagcaagaggatttcttttataacccctcttaagaatccgtgctatcgttttaaaagtaccttccattgcttttaaaactaaattgccgctatatccatcagctatcaaaatatcacatattccatccagtaaaaaccttgattccacaaatcctaaaaagttaagatttttatcagcttttaaaagcttaaatgcttcttgatgataatcaaaacctttattttcttctgttcctatattcaatagtccaattttaggagttttttttgtagttgtttttttaacaaaaatatcagccattaaacctaaaaaataaagttcttttcctgtgaaatatttattagctccaacatccaaaaaataaaaccaattattgttatctgtcggtacataagacataaaagcactcttagtatttttattaattttgccaaaagcatcatttgttaaagaagcataaactgctgaagagcctgctgaaattacaacatcagcattaccttcacgaactaagtttatggctatttgcattgaactgttaacttttcttcttgcacttagtggagtgtcggtcatttcaatgaaagaattagcaagtttttttgtaatattttttggaagtatatcaagaccatcaaaagccttttcatcaccgatcagaatgaaatttaagtcctgatgaaaactccaatatttcaatactgcttcaattgcttcactaggtttgttttcaaaacctaaacaatcaactgcaaatctaaaagccattactgtatgcctattatgtaagagaacactttttgttctccaggtgaaaattcacaaaacaatttatattttttttcaactaaagcttgcatttttttcgcatcttgttcagtgatgtctttgccataataagccaaaaggaactcaggttttttcactttttttgaaaggatatcaattgttttaaaaaaacagtctgtaagttgagattcactagcaataatacttttatttgtaacagcaataaaatcatttttattcaccattactttgttttctttatatgactttgaagcttgtgttatcgtagcggaagcaaactctttaataaagcgcttcattgctttcacattagtgtgaatagaaagatcactgttaaatacagttaaagcagcaattgactccacaggatttgctgtaataacataatctgcattaatcttttggtgttttaactgtttaattgtttcattggcagatagaaaatagtttttatcatgtaacaaaaagattacattactagaattggttaacttaacagcctcaagtaaagaaaaaacagaaggagccccagtatcatcagtacataatatggcgttaatatcatgatcttcacgaattctttcagcaaatgcttctgtaggtacagtagctactatagcaggttttaaaactctttttgttggtgagttattcttgttattaacctgtaaattcatgttatcaattttgacaaattcaaattcaccataattaagacccatttctaataaaagatgtggttttaaagtatgagcatgaactttaacaaaaccattgtctttatcactagcaattactacagaattggcaattctatttactttactttcaaactttttttgatgaaatttttgcttttcaactgtctgatttatttttaaacctagtcttaaaacatattctgtacaataaccaaattcatcttcattagcatgttgttctttaaacttgttaaatttaatttctatagttgataaagtattgtcatctaaattagattcgcccccataatatgacaacattccttcaagaaaacaagcaaaaccataagcacctgaatcaaccacacctgatgcttttaatacaggtaacatttggggagtttttttcactgcttgtcaagctactttaacagcttgttcaaaaagtttttcaagtgttttaggacgatttttttgactcttaaactcattgcttattaaacgagcaactgttagcatagttccttctactggttttgatacgtttttataagccacttcttgagcaacaatgaatgcatttgcaacatcttctatactcaactctgaattattgcttgttttatttacgattatgttactgaaaaatcctttcattatttgtgaaaagataacccctgaattgccacgtgaaaacaaaagtaaatctctagtaaagtttttaccaagttcactaaagctttttatatgacttttttcattttctagtttcttgatggcttctgttattgttactttcatgtttgttccagtgtcaccatcaggaacaggaaaaacattcaactggtttatgtattcataatttttagcgatgttattacagccaaggcgtaacatatcgataaaagaagataaatttactgatgacatctaaagtaaaaccctagcttataagggataaaaaagaagtttataaccacaataattttaaattttaactattgaattaaatattcaaaccaaggtactattttactcttgaattgcattaatgaataatttgttaaaatgggaaacttgctcgtttctagtttaggaaaaactaattcataagcgtgaagtgcttgatgcttatatttattattacgatttttaaattgaatcaagctgtattttttatcaccaactagttgatttgaaaataaatttaaacacgcacgaatttggtgagtcctaccactaattaatctaattgttattaaagacatatctttttgagctatgtatgaagaattttcaaaaaaagtgcttatcttttttgcttctggaaaaggttttcattttactgttacaatgccattattgttatctttttttcaataagcagtttgtaagccaagatggttaaattgaccaaaaactaagcctttatatcttttggttaaatggttatttttaaaaactttgttcaattcttttaaagctttgtttgttttagcaccaataacaattccagaagtattacgatcaatacgatgtgcaaactggggataaaagttaagtttattactgtcaaattgtctatatccacagtgttttaaaagcatatttgataaattaataatgctatgttttttatcaggttggcaaactattccagttggtttgtcaactacaataatattttcatcctcaaatataatttttagcttatcttttaccaaatctagagataaatagtcattattagtttgtaaatagggatttatatcaaaaagaaaagctatctcatctttagtttttaatcttgtgttgacctgtggttttgttttatttaacaaaacctttcctaagcgtaaatacttaaaaaagtcacttcttttaattaagggaaggatttttaaacaaaattggtcaattcgttggttttcactttctttaggaactaaaaatttattagctattctcattttgtttggcaagaaaatcatccattatctgtactaatttcataaattgatttttttcatccaaaacaaaagcagctgcatatttatgtccaccaccattgaacatttgtgcaaagttattaattggaatattacgtgagcgaatggaaccaattcattttttaatggactcgttaaagtaaacagtagtccatatttttactccttttatgttattcaaagcatgaaccattggtaaaggagagacaacaccaaaatgtttatatgctccttttttaatcaatgcataagctaacccatttttagttattttggctttgctaagtacatagctaaagtacttatgttctagtaatggctttaaataaactgcatcatgaaccttattgcggttaaaaccagtttccatcaattttgctgttagggcaaatgtttggggtgtagtagttggacctcagaatcgctgtgtatcagtaattattcctgcataaagatatgatgcaatctcatcatttaatttgtaacccatctgcaaaattaaataaccaatcatctcagcagttgctgaaaaagaagaatcaattcattccatatcagcaaatttttcagttctaggatggtgatctatcctaactgtctcttttgccaacttatgtttttgagttaaaactctttcttggttggaagtatcaaaaataatagctaaagattcttttacaaaatcatcatttatgtcagtttgctcaaaaggaaaaagttctctaccgtctgcattaatattgtatgaacccataacataagcttttttttcactgaaaaaagtatttaggaaagttttgaaagcaaaagcagatccaaatgcatcaaagtctgggtttacatgtacaaataaactgaacttatcaaactgtttaaccttttttgaaaaattcttaatgaattgtggatcgatactaatcattgcttaattcacttactcccttttcaattaaatcatttaaaaaaataagctcactttcaagcttttcaacatttatcaatttagctttcgttgtaggatttttgggagaaaactcactacaagtatctaaatgttgttcaatagaaatatcaaaagtattaaaaaatttagctaattcaataattttatctttactaaagccaattaaggggcgaactataaatgtatctggtgttgctgattgaataacttttaaattttcaatggtttgggatgcaacttgtcccaaaacctcacctgtaactagacaatcatacttaaacatactagcagctttataaaaaacacgacgcattaaaacgatacgataagattcattactaatatgaattaactctttttgaattgcagtgaaatcaaaaactaataatttaccactacaaatcgttttattaaaagaaattaaatttgctaaccttgtgattttttcaattgttttttgattcttatttggttcattaataaaggtgataaaatcaatgttaaaaccacgttgcattacaagtgaagctgcaactgggctatcaattcctcctgaaagtaagactaaagctttaccactactataaacaggtaatccacctttacctttaaaacgttctgtaaaaacaagaaaatgctccttcaaaatctctatattagctattatttcagggttattaattactccttttaattggtatttttcaaatagtttaactgctaaatacttcttaaaattacttgaattttcagcaaaatttttatcacgtctcttaacttctaatttaaaggaattaaaatctttaaataaattaaaaagaagatctaatagtttgttttcttcccttactatctgtgatgcaaaaaagaacaaactaattccaggcaaaaaactgaataattcttggagaatcgctctttgttcttttttaatatcaaagacaacaattctatcaaattcataaacaatactattgttaatttccagttttttaaaagcttttttgatgttaatttttaattgttttgtgaaataagaacggttttttccttttaaaaccaattcaccataacgcgcaactaatacatcttcactattcaattccattttcctttaatcattgaatatcactttctgttagtttaggacttttaccagttaatatgtaattttcatatcaaattctcgccttatcaactaaaacactaaatcccttatgatctatcttgataggaattaacctaatttctctattgctagcattaaattgttctggtaagacataatcttctggtttcaaaaaggcaattgcaaaaagtcctttatttacattgcgcaaatatagataaagaccaatttgacaataatataaagtactgataataatttttccattactgtcaaatcaactatcttttttgccatctttctttttaacaataggcataccattttcatcaagaatcatcttgagatttccattgatttttttataaataagactatcgcaagaagttgttttaatctctaacataggaagatcattttgataagctaattcaccattttcatcaagaggttcaccatcaggtatcccaccaaaaacactatcatccttaaataaatcaaattgaacttttttaggatcataagaatgaaaattaaaaccagtttttaaattgacataatcacgtattttaggttctattatgtttccagcttttgccagtgtttcatcaaattcatcttcataaattttgaccatattagctcaagttttaaatgatgactcatattcagataaacctaaaaccttgccaaagcgagtaccggttatttttttaaatagagctttatttcttaaaaaatactgttctgatagaacaatttgattatcaactatatcaaaatcagttttatattgctttataaatcccatttatttcatcaactgttcacaaattccttttaaaacaattgatatttcaggattattaaattcctcatcattatctggttgttttttgcttaaaaatacaacacttgctaattgattaatgttattaattggaacttctgtcacatttaaataatgaacatcttttaaagagcaattcttgcttttaacatatgtttctaaagcactaaacttggaattttttgtgctagtaaataaaaaattttcgttataaaaattgctgtaatgaaacttaggctgaccactagaaatatgttccataagttgaaagtctaaatgatactgaggactaaatacataaatagaactaacatccatttcactgagattttttaagaaattttggtactttaatgtttggtcaaattccgttaatcaaattaatttgaattgcttatatttttctaatgaaataaagtaattaattgttgtattaggttcctcactaatcttgctttttccaattgcaaaaacaccagaattagtaataatagcatggtgtacaatagtgtctatactaacagaatctaaaaaagattgatagataaattcattggttttgctaattcatataatcgcgcctgattctgcaattatatcaacatcatctaacgagagtaaatcaagtaaataaagcactgcttgttgtcaacaacttgacataaaaacaagttgatggttattcgcttgaatgaaattaaaaaagttttttcatacttctaaatcctttgtagtgttaaaaaaatttgctgtattaatatctaaaacaactatttttctatccatctcttctaactcttttaacaaaattattaaagctaattctggtgattttttcacctttaaaaccacggcatgtcaacttctctaaattctctatttctttatctccaacaataagttgtaaaggaattttttcaatgattgcttgtctaacttttttagctaagcgatcttgattatcatctaaatttacacggatgttttcttttagcaatttgttataaagtttttttgctgcctttaaatgcttttggatattaacaggaataattacggcttgaacaggtgctaaccataaaggaaaattaccacttgttttttcaagtaaagcagcaataaacctttcataagttccaataattccaacatggataataactggtttttttagtgtattttttttatctatataagttagatcaaatttttctggtagtaaaaaatctagttgaatggtggcaatagtaatcatttttttaaagattgttttgaactgaaaatcaatttttggtccataaaaagcagcagctcctatctctttttgatattggatatttaaatcttttaaaacattctccatttggctttcagattctcttcataaaccaggattatcaataaattttgattgatttttaggatcatgtagagaaagatctatcctatcaaatataaatccaaattttttattaactttttgaattaaattaaatgcgtttttaatctcacttttaatttgatctgcacgacaaaaaatgtgattatcaagtaaagtcatgcacctcactctttctaatcctattaatcctccagaggcttcaaaacgatgcaaaatagaatcttctgaaaagcgctgtggcatttttttatatgaatatcgtttttgtttgaaaatcagacagtgatgaggacatgtcataggacgaagcatcattgcttgactatcaagtttaatagcaggaaacatatcttccttatagtgctgatagtggccgctaattttaaaaagctctatgttagctaatacaggagaacaaacagtattaaaaccaaacaatagttgctggtgatgcacaaaattaccgattatattccttagtgttgtaccctttgctaatcaaataggaagacctgcaccgatcagtgggtcaaagctaaataactctaattgtttacctaaagatctgtgatccttcttcaagcgttcttcattttcttttattaattgttctaattctttttttgattgagcaaaaatgccattaatcctctgaagttgtaattgtgaaggatctcccaaaaaataatttacgcttacatttaatagcttaataaaactttttttaataaaagttaaagttaaatcttctattcaaaaatgtttattttcaaaaaaggtgattttaaatttgtttaagttgcttttttttaataagttttttgtaaactgatcattttcaaaaaaacttaatgcttcatctaaagaaacaaatttttgagaaatcccttctagtttactagaaagagagtttaaatcagattctatttttgcaaactgttttgtagaaaaattctcatttatataaaaatctaaataaaattcatctccattaaaaccatgttcaccaaactgaacattagcatatttgcattttaaccatatttgtaataaaagaactcctgcaagcattaagattcttgataatcaatcattacttttgaatttggtttcataattttgacaacttcgattgttgtttttcaaattccactgcgtttttctaggtaagtgcgcagaataccttcgatgctaattgttttaaatttttgagtatatgcttcaagttcaaatgctaattgaccatttgcataaaaaacaaaaaaatcagtaaaacttcgttcaccaaacaaacgtttctgcttaatagttactaaaaatcctgtctttttgtggcttcactttgtgctttctatttcaccttccaaaaaaacgcaatttaacatgctttttagctaggtaattgacctgttaagttgaaatgaaatttaaagtggttaattgtttctaaaaccattctttcttctattaatgcagttctaataccttcaaacttttgtttatcatcaagatattctctaacattctgattagttttttcataatacaagctaataactcttttaacaatatcatcactaacttcaacctttcattccttttgtaagaaattaaatactaaagcttttttaatgattttttcagctattgattgaattgttttttcatcagcatctttaacaacatctcttttcaagccttcaacaacattttttaactcttcagggttaatttgaaattcaaaataactaacaatttcattcattgctgctgaaaacaaattatctttaataacaatatgagttagttcgtggtaaagagcactttccttagcatctttaaaagaagctaaaattctttgccgatgttgctcaataaaagcaggatctgcaaaaatacgatcaacttcaattaccttatcatactgaataggtttttgcaactttgcaatagatttaagattagtagccatatttttagaaacttattaaattttaattcctatatgcgtgaagaatttacatttgttgtggtgttgaaatcttcaaaacatcaaggatttgtttaactataaattgtaatgatctcaataaagcaagtctttgtgctgataaaagtgaatttttatcatcattaattttgcaaactttataccaggaatgaaataaactagcagtttcatataaaaagttagttaataagtgcaattcgcctgtttccatagctttttgcaacataaaaggataatagacaagttgatttaaaagtgatatctctttttcattaatcaaaagactgcaatcagtaatttcttttaattgatcagaatttgcaattctaagaatactattcattcttgcaaacgcatattgaacataataaactggattagcagagttttgcaaattagctatatctaaatcaattttgataattgtgccattattttgagataacataaatcatctagcagcatcttcactaatcattgaaagcattgtttcaattgtgattacatttccagcacgttttgacaaacgtactagctctttatttttatagagagtaaccagttgtaatgcaaaaatttttaaagaagttttagtggtattttttaaagcatcaaatgcacaatacatccttttaatatgtccttcatgatcagtgcctcaaacattaaatagaatgtcaaagccacgttgtaatttttctaagtgataagcaacatcagttccaaaataagaagctcttttatcacttctaattaaaactctatccttatcatctccataaagcgtagtttttagtcagagtgcattatcttgataaaaataactatttggtttaagttgttctaaaagatcattaaaatttgtttttttaacaatttcgctttcaaattttcaactatcaataaaaacatggattttattcaaatcacttttaattaaagacaaaactttttgggtgcaattaactaaaaaatgatctaagaatgatgttttacaaaactcttcaaaatttaaattatcaactggaaaattttcaatttcactagcaattttatctattactattccactatatccatcaggatgttgctggatagcaatatttttttttaactgcaaactttgataaacactaaagctaaaaactcgtgcttgttgtccataatcatttacccaatattcacagactgttgtataacccaacagcttggctaaattgtttaaaacatcaccaaaaaaagctattctcacatgacctaaatggatccttccggtaggatttgctgatacagattcaattaaaatctttatatttttcttagtaaagcaaggtgtttttatcaagtattctaagtacttttgatagctaatttgaaagtttataaaattattgttagcaataaaaacattttggtagttatcctttttattttttaaaaatcactcaacaatactatctgcaatttttttatgattttcactttttagttggaaaataatagttgaagaaaaaccattaaaactattatttttaactagtttaacaagttccttttggtcatcaaatttaagctttaaagcgctaatgcattcttttaaatcattgatgataaaaaacattactttaaattatatttaatgatgcaaaatgtcttttatcataacagtaataggtgctgggcatgctggattggaagccgctttcattgtaagcaaattcaacatcaaagtaaaccttttagttcttgatataaatcatttaggttcttgtccatgtaatccttcaattggtggacctgctaagggaattgttactagggaaattgatgttttaggaggtatgcaagcaattgctgctgataacaatgccttacaatataaattactaaatagttcaaaaggacctgctgtgcaagctatcagagcacaaattgacaaaataggttataaaaactggtttcaaagtcaagttaaattaaataaaaacattaatctaattcaatctgaagcaatcaatttaattgttagaaatgaaaaaataaaaggcgttattttaaaagacggaagtgaacttttaagtgatgcggttattatcactaccggaacgtacctaagatcaaaaacatactgtggtaatacagttaaaaatcaaggacctgatcaatctaaaaatagtgaaaaattaagcacaaacttaattaacagaggttttaaaacaattcgtttaaaaacaggaactccgccaagaattttaaaaacttcacttgactataatcaaatggaattagaaattaataataatcaaaaccttgcttttagtactacaaataaaaatttcttaccacttgaaaaacaaataccttgttacttagttcataccaatcaaaaaattcacgatctaatccttaaaaacttaaaaaaatctgcaatgtttaatggtagtatttcagcacaaggaccactttattgtccaagcattgaagacaaagtttttaagttctctcaaaaacctcgtcaccaaatttttgtagaacctgaatcattgagtctagatactatttatttagcaggattatcaacttcttttacaccagaaattcaaaaagaaatcatccagcttttacctggttttcaaaatgcagaaattaaaaagtttggttacgctattgaatatgatgcttttctatctaatcaactaaaaccaacacttgaaacgaagttaatagaaaacttgtattttgctggacaaattaatggcactagcggttatgaagaagctgctggtcaaggtttgatggcaggaattaatgctgctttaaaattattaaaaaaaccaccatttattttgcaacgtaatgaggcttatattggggttatgattaatgatttagttactaaaacaatcagtgatccataccgtttgttaacatccagagcagaatatagactatgattgagaaatgacaatgttcaagaacggctcattaaaaaaagctttgaacttggtttaacagataaaaaaacatatgaattgttccttaaaaaggaaaagaaaaaacaggaattaatttcatttttaaaaaacactcaagtaggcaaggttaaagcattgaaattcactaataaaaataccgctcaatcactttatgacttcaacaaacgaagtgaaataaatttagataaattgatcaaagatcttcctgaaaaataccaattagattcagaaacacttaaacaaattgaaattgaaattaaatatgagggttacataaagaaaaatgaaaagtattttaagggtttagataaattaagcaaaattaaaattcctcatacttttgattaccataaggttaagaatttagctagtgaagctatttttaaactatctaactttaagcctagtaatttagcaattgcaagtcaaatagctggagtgaactttaatgacattatagccataaaacattttttaaaaacttatgaataatgctaattttgaaaaatatgttgatttagtttttgaagcaaacaaaaatttcaacttaacaggatttaaaacaaaagaagctatttatcagaatttagttatagaaatattgacattatttaaaggatatgaaaaattttttattgacaaaactgtagcagacttgggaagtggaaatggttcgcctgggataatattaaaactgttatttcaaaaaataaaaaagttagttttaattgatagtaaacacaaaaaaattagctttttaaataaattaactaagcaactaaatctggagaaaactgttgcaatttgtgaacgaattgaagtacataaaaatcactatgatgttatctgttctcgtggtctaagtacgattattaaagttaatgatttagcattttccttgcttaactcaaaaggtattatttttcatataaaacaaagcttagaccaatacattgaatttgaaaaatcaaatcagaagaatcaatttaacttgttatttataaagcactttactagtcagaataaaaaactaattttgatagctttacaaaaaaatgattaagttaggttgagcgtcttttagtaatacagaatttgctcaagatatctttataaagtttgccaatcaattctataaacaagatgatgctggaacaattttatttgaactaaaaaaaacattaggagttaatcaactagatgaaattgaaaaaaataaaaaagttattattgttaatcagtttcaaaatagcttaggcaaatttttactttttaataaagaaaatactaaaagaataaacagtttagctaatgaacatataagttcttttttaaaaaaaattttcagattatctggatttaaagatatgttgattgatgttcaacatcataaaaagttacaaaaatgtttattaagagaaattcatcttttagtttgtttaattaatagcaatcaatttagtgatgaattaatgcaaattattgagtggtatcagtatttaaaaaaacactctagtaaactttttgttattactgcaagtagtgataaaaaaccagtaatagagccaactataaatgaatataaagctatttttggagagtatttatcttcatttcacctagatctaaaaaataatcaaagtaatgatttattccagaaattacttgatcagatcaaaataaaagctacctcaaaaactagtttgagatagctaaaaatataaatggcgcatcgggagggatttgaacccacgacaacacgcttagaaggcgtgtactctatccactgagctaccgacgcatttctttactagaaactatcatatgaatcttcaataagactctaataaaagtttagatgatttttaacttttttattgtattcatgcaataaaaattaatttaaataaaagaaatttattaaaaaatccttaaagcacaaatatcaataatttccttttctattgattcttaactatttttaaaaaaatagtcaatttatttagtcacaaaaaccttagttaaaaataaatttaagttgcaattggattgaacatattatttaaactttcttttaaattaagtgttttaaaagttgatttttaataaattaattaacaaaataagataaatagttaaaaactcaataataaacgctttaaaatatttcactttgatggatgaaaaagggattttagttgcaattagtggtggtagttgctcaggaaaaactactgttgctgaaatgatttatcaacttttaagtaaaaaattaaaagttgcgatcatctgtcaagataactattacaagtcctataaaaataagccattattaaaaagaaaaacaataaactttgatcatcctgatgcttttgattgaaaacttttaagatcacacattgaagatcttctaaacggtagtatagttaatgttcctttatatgactacattaactataccagagctaaaaaaacagcaaaaattggtccaattgatgttgttattctagagggtttaatgccatgatttgatgaaaaattatcaagactttctaagctaaaaatatttatagaaacaaatggggaagaacgtttaattagaagaatagaaagagactgacaaaggggaagaaatattgattctattattaaacagtgacgcgaaatagtagcaccaatgtatgaaatatttgtagaaaaaatgaagcgaaatgctgatttaattctgccttgaagtcaacgcagagaagtaagtacaagtgtattggatgtcgcaattgaacacttatttcacaaaactgttgaaaaaaataattagttctggaaattatagagatgtttaaatttcaaaggtgaattatgtttatgctctgcttttgctttcaaatctaaaacaattttttgcttttctgaactaagtattaaatcaccttttaaatattgatcaagttccttataagtaatgcccatctctgtctcatcagtttgcccttcaaaaagactagcagttggcgctcttgtgattacaatttcaggaatattaaaatgcttagctaatttgtaaacgtcctcttttaaaagccatgctaaaggagcaatatcacaagctccatctcctcattttgtgaaataaccaagtgtatactctacaaaattaccagtacctaaaactaagaagttgtgtttttgagcataagcatataaagttatcatccgtaaacgtgctttaatgttaccagctgttaaaaaatctttttttggatctattccaagggtttttactaacagattgaaactctcttccagttcaatgttaatactattaaattgcatttttttaacaagttcactagttgcttgaaaatcaagttttgaattattaatatgcattattaaagctaaatggttttcaaaaccaaaagtttctttagcaatagcagcaacaactgctgaatcaattcctccagataagccaaaaataacacctttagctttagatttttttacataatcaaacagccagttttggagttcttttaaatatttaattaaattagtcattaattacaaattcacaaccatcaaagaaaataatatcaccttttttagcaccaacggattttaattgatcttcaataccgatttctttaattttatttcctaagcgacgaatgttatcaagcgtagtttgtggaattttatcaaatcaatatcttagacgtttacaattaacaattcatctgtttaaactatctttttcaatatttaaagggtcgttattattttcattggtattttgaaaaacataatgcttctcaagttccattggcaaactaaacttattagctccaaattgggaaattgttttattgtaaagttcaaaaactctatcaagtaaattgcctaattctttctttaaagcagaaatttttaatacagaaatagattttttttgaagaaatttttctaattttttaaaccgtttctcaccttcattaacatcaattttattagctacaacaagcatcttttttttaactagaaggggagaatattttgaaagttcatccattatttgtaaatatgctttgcaaggatcatcattatctacaggatcaagtgaaattaaatgaattaatatttcacacctctctatatgccgtaaaaaatcatgtcctaacccacttccttcactagcattttcaatcaaaccaggaatatcagcaaaaactaaactattattttgatatttaactacaccaagtacgggtattaaagtagtaaagcgatagtttgcaattttaggtttggcatttgaaagtttggagattagtgttgatttacctgaatttggaaaaccaacaattcctacattagctaaatatttaacttccaaactaacgtttaaaatctctcctttatcaccattttcatatagattaggagcacgcataattgggcttttaaaagcagcatttccttttccgccttttccgccaaaacacaaaataaaactctgtttatcatgaacaaaatccaccaatacactattattttctaagtttttaactgttgttcctattggcactttaattaaaagatctgaaccatttttaccatgtgctaaatctggtttaccattttgtccatcttctgcaaacaggtgttttttattcttcaagaaaaaaagtgaatcgcagttatgatcagcttgcaaaataacattaccaccattaccaccattaccaccaccaggaccacctttatcataatgtgcttctctttttcatgctatgattccattaccaccatttccagcagtaaagcgacactcacaataatctgtaatagccattattttggtttctttttctttattttaaaaacgatttctgcagatttttttctttctagatcactttgaatttgttgcaacttttgtcgatttttagttttagatttacctgtctttaagagattttcagcaattattattgcatattttgatctgattaaaaaaaagttagtcattttattcaaaagaaaaaaacttagcattaatgttattagaactaaaaaaaatcgaagtaagataattcaactatttcaagccattggtattattcctgataaaaaaagaactattaaagtaaaagcagtagaatagcaaaaaggaattaattcccaaataatgtatttagtaaaagcaaataaaaaaaaggctaaaaaaagataaattagtaaaggaacaaataaaaatcacaacaaaactaagtcaaaaatgggctctatttccttacccataaatgttctgttttgtgctgcaattaaaaaattaaagcctagtaaattgatttcaccaaaaagaattcaaatcaaaagataataaataaaaactaaaaagaaactaaaacttcctattagtcaattaggggttttagtttttttatttgacttgaaaaaataattcaaaactaataaatttgtgcagtaatttgaaatttcacaaagcgatcgttttcataaaattgataacgaagaagacccttgataactcaaagaataactggtaatcccaggttttgaatttctttgcagttcttatgataaaaactctcgtttggcactaaaaaacggcaatatctcattaattcgtctctagaagctactaataaagcttttttgtttgcaattacaaaaccggttttaaagcctttgaaagtctcatttattaacttaatgatatgaaaattactacttaacaaaatcattttttctttagctaagacaaaatctttgcaaagcaaattcaactgttctaataatgaattgttattttctttatcatctttaatatgaatcagcaaatatttaaagggctgaataaattgcgttaaaacttcctttaaagtttgaatttgttgtgaagttaccttaagcttaaattcacttgcaaggttaacctttttaagatcaactaaattaatttggtttaaattcaagtttttattagaaactttaaagttttctttatgagttactactatttgtttatctttggttaattgaatatcaattcaaataccatcaaaatcaaaaacttgggctgcttgaaatgctaatttggtgttttctggtgcaatagaactataaccgcgataagctattaaaaactgttttcgcattactattttttatcattactgccaaaaacatccttagcatcatctgctgaaaattgactaagtcattcatctgcgtcaatagagtcaatatcataaccttcaagagcaggaatatccttagttatatcttcatttaaattctcagtttcctcagactggaatactaatcagttaccttcactatcaaattccccatcatatcagtttcattcattgtcttcatagtaaccatattcttcatttccgattaatttctctcaaaacttaggtgcctcgttaattcgtggttgacgattctttcattgttcatcaacaagaactcagtctccagattcatcatagaaaccatatcaaatccactcacctttattgttgtacctaccataaacttcatcaccaataagtggtaaataatctctttctctagctcatttaacagttgcatccttatttcatttttgatcatcaccaaagaatcctgctcaaactcattctccatcaggttcataatgaccataactattgttaccaactaataattctcaatcaagtgattcttcttcactagcttctggttgaatttcatcagcttgaggttcttccaatactgtttcaggttttcgttcttcaaagttaggttgaacaactacttcaggttcactagaaacttgaggttcttgaatagtttcaactggtgaatcaaatttagcttcttgaggagtttgttcaggttgaacagtatcaaaagtagcttctggttgagattctacaggttgaatttctggttgagtttgaacttcttcaaggagaggttcaggttgtgaatcttgaaccgattcaactggtgaatcaaatttagcttctgcagatggttcaaaaactgcttctccaggttgttgttctacttgaggttcaaattgtggctctgatggttttgattcaatttcataatttggttcatcaaagtcataattaggttcatctacatcatattgaggttctgatggttgtagatctgaatcataactaggttgatcaaaatcatagttaggttcatcaaagtcataattaggttcatcaaaactagcttctgattcaacatgttgttgagttggttcactactaaattcaggttgttcaacagtttcaactggtgaatcaaatttagcttcttgaggagtttgttcaggttgaacagtatcaaaggtagcttctggttgagattctacaggttgaatttctggttgagtttgaacttcttcaaggacaggttcaggttgtgaatcttgaaccgattcaactggtgaatcaaatttagcttctgcagatggttcaaaaactgcttctccaggttgttgttctacttgaggttcagaaataactttttgttgattttcaacatcatcaaacttaacttcagtagttttttcaggttgaacatcaaaaactgcttcaggttctccaacagtatcagtagttgtttgatcaactacttcagcttcactagaaacttgaggttcttccaatccctcagtttgagtttgatttttatcaaaaactgcttcatgtttaacagtatcaaagctagcttcagttattaattgatcaactggttcagatttaggttcctcttctaatattttttcagtctgtgtttctaattgaggtttttcaaaaactgcttctgattcagcttcagatacattatcaaaagtagcttcagattttaattcttctgttgataatggttcagaggaggtttcctgttgaagttctttagtttcatcaaaagtaatttcagcttctgtttctttaggttgaacttcattattttcaacattatcaaagttagcttcctctagttttaaatcttctaacttagttccatcaaagatttgttcaacttcagcagtaacaatttctggatgattttgatctaatgcaggttcagatggttgatcttcagagctaggttctaattgggtttcaattgtttctggttcaaaagcagtaacttcagtaggtgtaacaactgtttcttcagactgattttctaattgttgatgatcaaaaactgcttcagttttttcttctaatttaatttcatcagagatttgttcagcatgaaattcagcttgcgatgattcttggggaatttcgactggtgaatcaaatttagcttcttgaggagtttgttcaggttgaacatctggttgaaaatgatcatcaaaaacaacttcagtagtagcttcaggctgtagttcttgagttttaatttcatcaaaaactgcttctggttgaacagtatcaaaagtagcttcaacttgtgatgattcttgaggaacttcaacagttgaatctaatttaatttctttgaaagtaggttggagttctgaatcagaactctctttttcgtctggttttgaatcaaataaagcatttgattcaatgatttcagttaaatcaagcggtagaggagtgaataagttattttcatcttgatgttcaaataattttgtttcttgttcaactgtgggtacatttgattcagaagtctcaacctcttgagtttgactaatgaattcaagcgtatctttttgttcagatgaaaattcattaggagtttcagcactttcagtgaaactgtcttcaactatttgatatgttggtaatacgaactcactatcagtttctagttgtgttgttggttgttcttgaacttctttttcagaaacatctaaattaataaattcattaccaatttcttcatgatttaattcaacagatgtagttttagtttctaatgatttatcaacatcatttacagaatctaattcaagtgataggtcaggttgaatgaaaggtggttcactttctacaactattgttgttttttcatcaaataatgattttggttcagtttcaaggaaatctactttatattccaatccttcttgaggttttggatcattattaataaaagttatttcatcaactagttcacttttgggaagttcacttgaaaccttaacttctgtttctgttgaaaaaggagcattaacatcaacatattcatttgttaagagtacctcattaacaagtttttcactaaataaagcagttaaatcagtattaacactttcatcactgtttgtttcttttatcttttcatctgaaacaacaggttcgctaaattcttgttgaaattcattaacagaataagtaggttcaaattgttgttctgaaactgtttcatttatttgagaatcaatattattaacaacttcatctctaaaaagggattcattaatgaaatcattattagcatctaaaataatttcatctacttgtgatttttcttctacacttttttgtgtttcatcagtaaaagaaccgaattcttttcaaactgaatcaatatcatcagaaatattagataaatctgctttagcactatcttttatttctttagaataatcttgacttaaatgttcaacatgtttagcaatttcatcatgttgttggtcgtctttaataatagaatctaagcctttaagatcatcttcgtaaacaaaaacggtctcaacttctggaacatttcctgcttgagtttgattggaatctaagcccttaagatcatcttcgtaaacaaaaacagtctcaacttctggaatagtagtttcaggttcacaagctgcttcaggttcaatttcaacaggagcctcaacttcagattcaaccttaacttcctctttaacgatttcaattaaagggatggtttcattagtttctttaactggatttaagaattcaaatttttctttttcaaaatgtaatttagttactggattacggaagataacttcatttcttcttggtttaacttcttcaattaccggctgctcttcacttgaattttcaagtaatagttcgttttctagagaagaagctaagctcttggtattaaatactgtaacaacaatgtcattttcctgttctcagtatggttgttcagaaatagtctttttctctatttcatcaactaagctatcagtatgaccaagtgcttcttcagtaaagcgaacaggatcagggatccaatttagtttcttgtcaaaaaatccttttcagatccatgtattattttgaacaaaaccatagttagggttgcctacaagtggtcttcaaaaatcaatatcagctggtctttgtttaatgaaagctgcatgttcttgaggaacttcaactgtttcaattaccttaaagtagtttcatctttgtaattggtcaaaataacctagtcaaactcaagtatgattttttcaaaaaccatattttctatcaccaacaaagatatatcagaacgcttgtgaatcttctggatttaattttttttctctaatagttgttgtaaaactatctttttttgtttctagaactttggtttctggttgattgtttaattcaaccaacttattttcattaatggttggataactgcttgtttgatttggaactgtattaacaacagttttttgattaagttctcttctacttaagatatctgtttcaggtggaacaataaaaacaccgcgcttggtttcatcaaaaaaatctataggtgatttgctctttgatttaactgtttcctttttcttactattaaaagactttgttttcttgagaatgttttttttgatttcacctaaaaaaggttgatcaaaaagattttcaactttatcttgttctttttttggtttagtaacactcttcttgttagctgattctaaatactttttggtttttgatttaggggtggtgtttttgtttttattctttgttgtttttggcattaataaaaatacttagcactagtgactaaagttatctgactcactaaattgtaatttttaatatcaagataacaaaagttagctatatatgctaaaaaataaatagattttaattactatttatattaatttatttaatgtagatttaatagtgtttcagcttctttttgcaaaagaaaaatagttataaaatcaaaaattaatcactttaatttcaaaaaaatttgacagctaaagctttacattttattaacaacagaacaaataatttttagcttttaaaaatttatttagaaagaaaactataaacaggcaatttttgtttttctgtttttacaaaaatatcaataaaaatatcacagtcaaaatgatttaatagttttttgcgagttgctatcccaattgctttgatcatttctgcattttttccaatgataatctttttttggcttaattttggaacactaattactaggtgaatttttaacaagtttttttctttattgaaactcttttcaataatttcaattcttgctatatggggaatttcgtttttgcaataaaaaattatttgttcacgtaatccttcaagaatcttaaagtcatcgttgtttgcatcaataaaattgatatctttacgaaagatattatacctaagttcaacttgtttaaaaattgatcaaaagaggtttttatcaaacttaagcaagtttatttcaattgttttttgtggtttaaactcttctaaaataattgctttattaacttcacttaaacttttttgatgaaatttattaattaaaaaaattcttgttaaattttgatagcgctttaattgttgtaattgagtttttaaaaattctatcttgttattctgatcacttctaacaactaaaagtaatacatcaattccacttaatgctttgcgaatttctttagttattaattcataatttgaatgttttttctcagtaaaaccagggacatcaataaaaacaatatttttattagcttggttaattacctcagtggaaatagaaagaagcgttgtgttattcatggatgataccatcagactatcatcgttatgtaaaaaattaattagcgttgattttcctgcattagtaggtcctaaaacaccaacttttaaaactttcatactgataagatctcttcatgaattgcatcttgaaaaaacatagtaacgctttcaaatgcttcactttcttcatgattaaattcaaagaggtgtaaaatgccgtgtattaagcatctagttaaaagaaatcaattgttacaaccaatctctttagcttttttaaagatgtatttaggacacaaaaaaatttcgccgattgctagtgaaaaaccggtttcagtttcgttatagcacaaactaattacatcagtacaacctctacgttttaaaaactgtttgttcagttttttcatttttgaacaggaaacaattaaaagcgcaaattctgggtcaaacgataggtttaaactgcttttaataatttggaaacaaagttcgactcctgcttggtaatttttaccaaaaaagcgcttaaaaaggcggcttgaattaatgctaaaagatgacttcaaacaaatcttttgatggtaacatgatagtaatattatatcagccctgttctagagtaacacttaaatctacctttactagatttttgttcaattctgatgaaatttctgatgtagaaattttctttttgtaaagtctaaaagctttttttgctgatttttctgttgtttctgcttgaaaattagtccatgaaacgttgttaaaaagattttcatctttttcatttttaaacattaaaaaattttgttgttgcgtagttcaaagatttacattaagatattgttttacctttactgaaaacaagatagcaactgttgttaaaagcaaaataataaaagcaattgttattcctaaaattttctgcttcataatttaactatttcttaagtaattagttaggttaatcttgttttgagcttcacttgcaaaactcagatcatgctcaactaagactacaaaattatttaaagtaagtggttttactaatagctgataaacacggtttttaatttcaggtgctattgcattcatgcattcatcaagtaagatcaccttattcttaatgttgctaagtaagaatagttgtaaaatttgtttttgtcctgaacttaactttgtttgattttgaacacctgcatcaaaaagtaactgatagatatgtggattctgattattaaataaagcctcactaaagccaaaatcatttgcttctgtttgcattaaattttgaccctttagataataaacgttttcaaaaagctgttcttttgaacatctttttaaatcgacgttattaaatttaatattgcccgtatattcaaaacctctaccagttaatatttttaaaaaagtagatttaccactaccattttgtccaaaaataactgtttcatttttgatttttaaactaaggttagctaaatcaacgtgttgattaagtgtaactgataaattttctagactaatttcatcaggacactgtcaatttactttaataccctcatcctttttggtttctataaacaagttaactaatttctcacgacaatagtgataaatgtttattgcagcaccaaattgaacaattcttgtagcataagttgaaaaaagtgattggataccaaaaacatagaataaaaagctcaattgataacgctgttcaataataccaatcacccccaaacctaatatagcaaaatcaaaaccttgttggaagaagcttttaatgttttctatagttagacgattaatttccttctggttgttaatgttttgattttgtaaaagtgctttacgaaaattcaacattaagaaattaaagcgctttttattttgttcttcacgcaaattttcatctagctgtaaactaattttgttttgcaattcaacataaggaatttccttctttgtaatttttttagtaaaaaagaagtcataacaaaataagccagcattgactactatttgtgcaatggcaatcaataaaaattctaattgattaattcctattaaaacaccgataattagtgcaacaacacaactaataattaaattgggaatataaaagttaaaaaaggaaagaacttcttttaaataaaattgtcgttctattaattgatttggtgatttattactaaagtaaacaaagcttttttgttgcaaactttgaataattcaacccaaatatccacggtattgttttcaaaataaaaaattcctaattagttgcaaaataacttgcaaaagcaagtttaatccctttagacatgaaaaataaactaccaaaacaactaaattaactgcagttccaaaatcaacagtattagttattatggtacgcgatgctgttgctaataatgtagagataccaataataatcagttcaataaaaacataaaaagtgactaaattaaaatcaaaaaagttactgaaaaaattacttttatttactggtggaatctctttaaatgcttttgcaacagttgctgcataacccgttcagagtttttctagcttttcatcagttaaaaggtattttccttttgcaggatcatatacctctcaactattttcatgtttgtttttaactatgacaaagtgatctttaaaatgaactattatgaatttgctatcaagttcttttagttcttgaaatgttaattgataactgttgatttcaagaccaaactttttgccataactttccatttcaaataagcttaagccatttggtggtaagttaatttgttctagtaattcatcatgaacatacttttcatcatggattgcattggcaagcataccaattacgcaaattccacactcattctgttgttcttgataaatgattttcatcgcctttgttttgtcttattaatagcaatgaaaagtgaaaaatgacaaatttgtaagctgttacaaacactacaaactgttttattagttaaaaataaagttacttattatttatttgcaagctgactagcacgttcgtacaaggttctcactaaaacaccttgtccaaggttctcaatggaagcagttgatgcaatatcacaatggatcaaagatacaccttctctaaattctgcaaggaaacaagctgctcttgaagatccagcacctcttgcactagtagaattttgcaaatcagcaagttttgttagctgtaaaggttttaaataatcagggtgcataggtaatcttcatacaggttcacctgcactacatgctgcttttttaaaagattctcactggtgatcacaagtactgaaaatacctgtataggtagtactcaatatgtatgacattaaaccagtaagggttgctacatcaataatatgtgtagcagctaaatccttagcagcatatgtaatagcatcagctaaaaccaatcttccttcagcatcagtgttatctatttcaacacttttaccattgtatgctatcttaatgtcatcaggacgttgcgccttagcaccaggaagattttcagtaagagctgctactgcaacaacattggttttaaccttgtttttagctaatgccaaaacagtagaacatactatagccgcaccactcatgtcatatttcatgccacgcatataatcacctgttttaatgttcattccgcctgaatcataagtaattcctttccctacaaaagcaagtttttctttggaatttttattagcttgataactaataacaagtaaacgtgcttctctttcagagccttgattaacccctaaaagtaaacccatttttttcttaattagatctgattgtttaagaacttttatttttacaggcaatttacttgcagccttttcaaaatgtttaacaaatacttctgaataaagtagatctgaaggagtgtcttgtaattctcttgctaggttaacatattcgcctactgtttcatattctttaactaagttgtgatattcaacagcacattgaacagcaacttcaacatttttttcaggtttggttttcattgtgaaaggagtagtttcacaaaaagtaacacttgtaataacagtttttatcgcagtatgaaaacaaccactattttcatttttcttataaagttctataagactgtcaagattaatgtttaatttggttttctttcttttaagaaattgaactaaagcacggttgaaagcaggaaaatcagttggtaaaacaacaccaaattcaacattaggattatgtgcagcttcttcttttacaccatatgtttttgaactcacaaaaacaactgtgttgctatcatcactaaaaggtttatttattctcattctatatctctatttattattctgaaaaggagttatcttttctctctttaacatcatacacagcaacattagtagtaattaatgaactagctacagaagcagctttttcaagtgcagttttagttactttggtgggatcaatgattccatttgcaatcatatcaaccttctttttagtctcagcatcaaagccaacaccagttttttcatttttcaattcactgagaattttaactgggtcaactcctgagttttgaataatttgacgcgctggtgcttctagagacttttgcacaatttcaaaaccaagtaggatttctttaatgttttcaacactagtttcattttcatatcgttcttttagtttactgttagttaaaacacaagaagcatttaataaaccaacaccacctccagcgataatcccttcttcaactgcagctttggtggaatttaaagcgtcttcgattctgagttttaattctttttgtgcgagttcagttgcaccaccaacacggataacagcaacaccttgacttaaataagcaattctttctttaattaaatcagaatcatacttgtcagtggtttgttttaatcttccgtttagaagttcaacatgctttttgattttatccttattgcctttaccaccaataacagtagtttttcctttagctatttgaacctttctagcatcacctaaattatcaacagtaacatctttaaaaccactattaatttcggtattatatgctaaggttccactactaattgctaaatcttctaaagctgctttttgacgttcaccatattcattacatttaacagcaacaacattaatggtgcccctgagtttattaactgctaaagtagtaacaacttcttctgcaaagtcaggtgcaacaattaataatggattaccattttcaacactaccttctaaaagcggaagaatttctttaattgtgttaatttttaaagagcttactaagattttaggttgttctaaaacaacttccattttttcttgatcactaaccatataaggtgatgcatatgttcctttaaattcaattccttcagtggtttctaatgttgtattaatggtttttgcatcatcagttgttatcacgccatttttaccaactaaagccattgcttgagcgatcagtttaccaatttctttagaacctgaagagatagctgcaacttgttctatctcttcgttagtattaatttttttagagtacttttcaagttctttaataataagtaagcttgcatcttcaatacccctgcggatgttaacaggattagcacctttattgataatttcaataccacggtttgtcatttcttgtgctaatatggtagctgttgttgtaccatccccagcaatgtcattagttgacactgcagcaactgaaataaccttagcaccaatattttcaactggatcactaagttctatttcttttgcgattgtaaccccatcgttagtaattaatgggtttgcaaattttctctctaaaataacattttggcctttaggacctactgttactttaacagcatttgctatcttattaataccctgcaacaagcgggttctcgcatctttaccaaagattaattcctttgccataattgtttaattttatctttttctttgcttaccactttctggtttttcaaaggcaagtacatcctcaaatccaataattttgtacttgtttccctcattctcaaaagagataccactatactccttaaagtaaataatatcaccaacaccaaaagcatattttggtttttctgttttgccatatgcaggaccagcaccaagagcaattacaatccctttattagcattagcatcgcttttatcattacttgccaatgaggtaataatccctttttttgagacttcttctttgtttgattccacaagtgaaaccaagacgttgtcatgaattggcgttatgttcataataaaaatattttaataattaaaaactaatttaaaagaaagtaaaagttatcttaaatttatctgatattagcgctaaacattaattaatatttagtgagatattgttaatttttaaatacaaattaataagctaaacccttatagagcggaaagcgttttaagagatttaaaacagctgtttttgtttgactaattaccttttgattaccattacttttaataaccttatcaatcaaactggcaacaaaaataaagtcattagttttaaaacctctggttgtcattgcaggagttccaagtctaatacctgaaggactaaaagcagattttgtttcaaaagggattgtattcatattcaaaacaatgttagctttttgtaaccacaacgcaacatctttaccattaccaaccactaatgaaaataagtgggtttcagtaccttttgacacaacacgataaccctgctttaaaaatcaatttgccattgctaaagcattatctttaacttgttgcatatactgcttaaactttggattcaaagcttctttaaaacaaacatatttagctgctatcacatgttgtaaaggtccaccctgacatccaggaaatactccactatcaagctttttgataattgcttggttgttagacataatgataccccccctaggaccacgcaaagttttatgagttgttgaagtgacaacatccacaaaaggcaaagggttttggtgcaaacctgcagcgatgaaaccagcaatatgggcaatatcagctaaaagatacgcattaacttgttttgcaattgcactaaattttttaaagtcaacagtcctagaatagttagaaaaaccacaaataattaactttggtttgtgttcgagagcaatttgaagaattgcatcataatcaagagtttctgtttcaaaatctaacgaataagttactgcttgatattgcttacctgaaaaattaacggggctaccatgggttaaatgaccaccacaattaagatctaatcctaagatagtatctcctggttttaacaatgctaagtaaactgcatagttagcagatgatccagaatgaggttggacattagcccattgtgctccaaataaagttttgcaactttcaatggctaagttttcagattcatcaacaacttcacagccttgataaaaacgtttactgggatagccttctgcatatttatttgttaatactgaaccagttacagctaatatgtcttggctaacgtaattttctgaagcaattaaacaaatgttttctctttgacgttgtaactctttattaagtaaaagtcttacctttgaaaacattcaacttaattaacgtaataaaaacggtgttttttgattgttcttatcaacatatttaaattcttccttttcactacttttaatttggtcgtacaagtgggtattgtgctttttagcaaattgtgcatagaaagattttgtgttactgtcaccaaaaattaaatcatagtgctgaaatttatccctattattagtagttctggttttatttttttcactttcacgtttagaagttcttaaaagttgagacataccaatgttatctttatgtgttttggaattcttatatacctctaaaacaccaaaataaatactgttaattttttggttgttgttaaatatagcacttccagaagaaccaccagggagattggtatcatcaagcattaaaccatatccatactgttggtactctttgtcatgatatttaagtttaaagtttttgaagttttgaaatgtaacaatccctttttcgtgtttaataactttatcaacatgactgtcttgggtttttttggaaaatatttcactacctatttgaccatcttttctggcattttttgtaattacagggatctctttagcagttgaaactaaatatgtgtttttactccataactgacttttttgattaaagttatgagttctagcaaactcttctttttgttctaataagcggttttgatcataacctctttcaagtacaggataacccaaaagatagtggctatggtttcaatgttgttctaaatctttggtttcaaatatattagtgctatcacccaaacttttataagtattaattgctggcttaatgaattcattgaagatttgtcaatcacgaagattttctaaattaagttccagttctataacagcaaagtctgcataaacaggcttaatactgttaacacctttcaagaaattagttgcggtatacgcagttttaggaatatttgatgtttgaatagaaagcagtgaatcatttacctttctttgttctaatttttcttcttgatagagttttgtaatatctgttttgttagtgtatttaccaattgaaaaataaacagttgattcatattcattaaactccctttgatcatctgttttgctgtaaggtcaatgatcaccgatatttctcaacccatcagcaacatgcaaattggttgcaatgtaagcgaaaaaagaaccttgcttttgggttgtgttttcatcaccttttcagtcaattaatcaaccagtgccataagagtcattactaaagctagtgaaatttaaagtaaaagttaaatcatatccttttctgtatatatcactttcttctgggataaaacttgtattaaatttaaagtttctgttgtaaaccttctgttctaccttaggttgctgatttacttctgttccttgatcagattgttcatctttaaaaggagtagcgttgttatctgttgtgctgtcgtttttttcttctataggaacaggaacaggtgaaacagcagaacaagaagctaaaagtgcttgtaatgaaattagtgaaaaacctaaactttttagtttaaaccacatatcaatctttaacattttaatacaaaaatatttcaaaacctttaattaatgaagttaagaagcacttgttaaacttaggctttagcttcaaaaataattgagttcatcttttcactgataaatttaattatttttattctgcttagttttagatgcaattaaaaagaagaagctaatgaaaaaactaatgaaagcaaatgcaaccatcaaaaaagttaaaaatgaaaatagaactactattgactcaggtaaactaactaaattaaaaccaaaaaaattaatcccgttagaatttgcattggcttgataactactatctaaagctagaaagccaactacaaagctaccaattagaagaattaaaccaaaaataaatcaaaaaacactattcagtttctttttcatatcgaataatcttatctatccgtctttggtgtctaccaccttcaaaattagctttgagaaaatcatccactattttaatgttttcactgtcagttacaaaacgactggaaagacataaaacattggcattatcatgttgtctagctaaagctgctgttttctcactaacaaccaaagccgctaatactccttttactttatttgctgccatacaaaccccaacaccagtaccgcaaattagtatcccaagatctttatcagaatttttcttgaccttatcagctaccaaaaaagcaaagtcaggataatcatcattagcatcaaaataattagggccaagatcaactacattaaactgcttagtctttaggtgttcactaataatttttttaagagttaaaccggtatgatcagaagcaataaagatattaaaactcatttaattcagttccagatagtcttgttttgtattggttttaattttagttaaaagattaattaatccttctaatgtatcaggatagttttgtcgattgtatagttttgttaactgttctaatgatctatcgatatgactactcttttgacgatatttatttgcaaaaagaaaagcttgtttgcacattagccttaagttaactaaactaacaacatcacaaataacttcagtcaattgaatttgcaataaatctatcttttcactaaacaaattaaaagtacctaaatagttattattagcttcagtgaagatgttatcaagttctaatttcgatttattaattacttgcaatgttttagcaggaacctttaaatcttgatcgctaattaaattttcaatctgaaaaaatttaaatcggaaatcatctaaagtatagacaaaaaagcgatagtcatcaaacttattaactgctaaattaagtaaatcagttagtgaatttttcagtttttctaaagcttgatttgtttgactcatcaagtaaaacagtttttcataattgatttgattctgagctaaactttgatggtttaagttattaatatttttagtaattagatcgcagttctcattaagctcaataattaaatcatgcacatctgtttcattttggaacactaattcaatggctttaattgttgtttttaaaagctcatttttcttttcatattgttgaatttgattacgaaaatcatcaatattttcaaccactaaattaatgcttttttctttggaactaactgcttgaaaaagtcaactaatcgcctcttgaacttcatccatattcctttcgcatagcattaaatttaagttattaagaaaattggtacaatcctttaatttaatggtaatgttattaatcaattcatgaagttttaagagatcttgactgttaattactttattcttcattaattccatttgttttaccttttgaattaaaaccttaaagtgatgggttaaataacttaacttaatatcaaacatatattgcctgttagcagtaataattgtttgactgagaatgttatgtaatttgtttaaaaaagcaatttgcttttctacatctttagcttgaatacaattttctatctctttaaacaagagcgaaatcctgttaagaacatttaaatagaaaagcgaatcatatttttcaattaaaaaattattaataaattggtttaaaaaacagaaagcctgacgataaaaaactaaacaatcatagctattgttgaaataaacaattgcgttcttagttagattaatgtattcttgttgttttgtatatagatgttgaagatttttatttaagagcttaatatttctattaaatcagatgaaacgataaatattatttggtttactgtaaactgttagttgctcaaaagctgaattgatttcattatcaaatttgatttgaaactgttttaaaactttaatggattgttctaacgcttgtttttcatttcttagtaattgaaatggactaatcacacaattgaaattgcttaatttcaagttattatagagttgtttggttttttttaaaagtaagttattttgtctaacaaaaagacaaactaatagataagcaccaaaaattactagtagtaagaaagggagcaagattagaaaaaccagcattttattttttcttacttgaaagttttaatagttcaaacattaaattttgttcaattttaacgtttagcttagcatccttgatatggtgaatttttctttcaagttctgtttttctttttaaggtttcattaatatcaacttcatcagcaaaaacaaaattttctgtgaaaatcttagcttctgtttttttaataagcattaaaccagcaccaataattgcttctctttttgtttgatcagcaaaaataattttgcacagatgggattgaatagcagcaatcaaaggagcgcgattaaaatttaatcctatgtaaccttcagtagttttaacttgcgcactaataatggttttatctagttttatgccactaggactaagtaccaaaaagcgcaataacttcataaaactatttagttttatcaaactcttgatttaatctttttgctttttcaacagcctcttgaatggttccaacataaaagaatgcttgttcaggcaaatgatcatgcttaccttccaaaatttctttaaaagattgaacagtatcatttaaagatacatatttacctgcaatacctgaaaacttttcagcaacaaaaaaaggttgggataaaaagttacgtatccttcttgctctttcaacaataatcttatcttcatcagacaattcatcaatccctagtatagcaatgatatcttgtaattctgcaaaacgctgcaagatattttgcactcctaaagcgactttataatggttgataccaacaacactaggatctaataaacgacttgttgattctaaaggattaattgctggaaaaatacctagtgctgcaatattacgatccaacactgttttagcatcaagatgggtaaatgttgttgcaggtgctgggtctgttagatcatctgctggaacatagatagcttgaacagatgtaatagaacctgttttggtagaagcaattctttcttgtaacttacccatttcaatagctaaagttggttgatagccaacagcagatggcattctaccaagtaatgctgaaacctcactacctgcttgagtaaaacgaaaaatattgtcaatgaataacagcacattctgattatcatgatcacgaaaatattctgccattgttaaagcagttaaagcaactctcattctagctcctggtggttcattcatttggccaaaaactaaaactgttttatcaatcaccccaccttgaatcatttcatagtaaagatcattaccttctcttgttctttcaccaactccagcaaatacacttaaaccagaatgttctttggcaatgttatgaattaattcttgcaccaaaacagttttcccaacaccagctcctccaaataaaccaattttaccccccctaacgtaaggagttaaaagatcaattacttttattcctgtttcaaaaatatcaacagtatttggttgttcatcaaaagcaggtgggttacgatggattgatagctttggtttttttggtaatggttcttttccatcaatgggttcacctaaaacattgaacatccttcccaatacatttttgccaacaggtacctctattggatggttatagttagtaactttaacattacgtgctaatccttctgtaggacctaatgcaatgcaacgaacaatgtcatcacctattaattgggttgcttctaaaaaaagctcacttttttttagttgtacactcaaacaatcataaactctaggtaattgtttactttctgaaaagataacatcaactacaggaccaatgacttggtgaactttaccatatgttaggttttctttttttatcaatttaattcatacctcctataacttcaataatctcttctgtaatagagttttgtcttagcttgttaaattgtaaagtgtatttatcaagtaaatctttagcattctttgtagcagcttccattgcattttgtctagaagctgattcacataacttagtttcaacaaggccaccatacagagccacatcaaaaaactgtggagtaattaaattaattatcgtggcttgatctggctcaaaatcaagttgttgatcagttacaaccggatttaaagttttaaaagtttcaacatcgaaaggaaaaacttgaaagagctgagattgttggattaatgagtttttaaatttagtgtaaaccatacaaattcgatcaagtttaaactctttaaatgcatccataatctgatcaaatatcgtttgacaataatcaaaattaatatcacgatcttggatatcaataaatccaacagcaggattatattgactatttttatttcaaaatgattggttttttctacctaaaaaaaagattttatcatcagctttaaaattagcttttaataacttattcatgttcgaattatgctgtccacaaagtcctaaagaagaactcatcattatccataaagttttttggttatctggtttcttttttggttcttttaaagaaacaactacttggccaacagctttataaaattcattaaaaaacaaactaatttcttgaaactgttttttgaacttaataaacttagcgcgtgacaccattttcattgcattagttatcttaatggtggattttactgtattcattctgcgcttaatttcttgtataaaagccattaattaagttcctcaatactaccaaatttggtaatatcataatctgttaatgtactgataaaacgtttcacaagcattttaaaagcggttttagttttactttctaaatcctcagtaaattcttttttgttagataactctttaaacagaggatgggaaccattaaattcttctgttatcctttgtttaaatttagcaatttcatcaactggaataaacttaatgaaagctttgttaatagcaaataaaaataatgcttcatggacttgagagtaaggtttaccatttggttgtttaatcatttccattactcttttaccatgctctaaaaccttttttgtattttcatcaagatcactaccaaattgactaaaactatcaagttcactatactgagcaagttctagttttaaactgccagtttgctgtttaatcgcttttgtttgtgctgcactaccaacccttgaaactgataaaccaatttgaattgcagggcgttgtccagcgttaaatagactactaaccataaacagttggccatcagtaattgaaataacatttgtaggaatatatgcagagatatcaccagcttgagtttctataattggtaaagctgtaattgagccaccaccattttcatcatttaacttgcatgcacgttccaaaagtcttgaatgtaaataaaaaacatctcctggaaaagcttctctaccaggtggtctttttaacaagagtgaaagagttctgtaagcaacagcatgcttagaaaggtcatcaaatacaatcaaaacatcctttccttttttaagtcaatattcagcaatagttattcctgtaaaaggacttaaataaaccatggaatcagagtcactagctgtagcacaaaccactgtagtgtatttcattgaatcattaacttcaagttggtgtacaatttgtgctactgatgaatttttttgaccaattgctacataaacacaataaacatctttatctttttgattaatgatagtgtcaatcgcaatagcagttttacctgtttgtctatcaccaacaattaattcacgttgtcctttacctataggaaataaagcatcaattgttaagattccagtttcaagtggttggttaacacttttccttttcattacacctggagcaattttttctatttgatcatattcagtagctttaatatcacctctaccatcaattgcttcaccaagtgcattgacgattctaccaagcataacatcaccaacaggagttttcattacactgtgggttcttttagcggtactgccttctcgtaacgaagaatagtcaccaaaaagtgctattccgactgtattttgttcaaggtttaatactattccttgaatattattttcaaattgaattaactcatttaataaagcattttcaagtccactaaccttggcaattccatcagcaacactaatgacttgaccaatttcactgttaaatatttttttggaatactttttaatttcagttttgattaatgctacgtattcatttagtttatctgccataacttctcaattaacttaaataaaatgggccattatgcgttttaattcatcacgcacatttttttcaaataaatgggaacttgattctatcctaattcctgaaattaaactgcgatcaatctcagttttataaacaacctttgttttaaaacgtttttccattattgcaataattttgttaagttgttttgagcttaattcaaaagcagtaattattttgataaattgaatgtgtttttgactttcaacattatcaaaaaaatacttaattgcctgttcaactaaagtaaagtaaccctttaaaataattacttttaaaaaatcaacaaaaacttgacaaaaatgatttttaaacaacttatcaacaagtcttattttatctggttttgttagtgtataagaattaagtaagaacgataatgaaccatctttaaaattacgcattaatttcagaaaaaaatggcactcttcataaattttctttacttgtttttgctcttcacttaattgaaaaagtgcagttccaaatgcttgtgcattaatcatcttctgtttcgttagcttctaaatctctaataaacttatcaataaattctctatctgatttttgatctattttcttgagaattagttcttgtgcagccaacatagccaattccacactctctttaatagattgttctttaagagaacgtctttctttttcaatttcctgacgagcttgaaaaatcattaagttagcttggcgatttgctgttttttctatttcactttttaattgcaaagcttcatagttagcttgatcaacaatttctttagaaactattagtgctttttcatgcctttgattagattcttcaagtagatttcttgcttgtttttctaattcattagcttgtttgatttgtgcttctagtaaatttttacggttatttaaaaacctttgagttggttttcaaaacaagaaaatcatcagtgttagtaagatgaaaaatgctagtaaatgagtaataaatacccaaaagttaggaaaaagttcatttattactgaactactcttaatttctctaacattctcagtacaagaaaccaaaaataagctgagtgtaaaaaagctaaaaactaataagcttcatttaaagacaagtttttttgcctttaccatccttaagctcctgctacaaaaattaagataaaggaaattaaaagtccataaattgctgtagattcagaaacagcagaaccaatgaaaattagtttaaaaacctgtttttcaacttcaggatttcttgctattgcctcaacagctttaccaaaaatataaccttgtccaatccctacagttgaacctgcaatcatagtaacaccagcacctatataagcacctagcttagcactagcgttaacatcctgggtagtttgagtttgttgtaatataacaccaactgtagctaaaatttcattaacatgttccataactaaatattttcttgaattacctttatgcctttaaagtgtaattcacttgcattattattttccaaaccttgattgcgcattttagcccaataattataagtcaacattacaaaaacataaccctgcaatacacctgcaattacatcaaaatagatgtgtaatactggggttattaaacctgcaaaaactgttcctaagctaagtgctaatggttggttattaatacttgaaaaaataaaaattcaaaagttataaaaaagcgccaaaataactgtgcccgctaatatgtttccccataaccttaatgaaatagaaaaaagcggtgcaaatccactcaatatactaaaaggatttggaatgaaagtagaatacttttttcctttaacagtaattccaaaggcaaactctttaaaaaaatttcatctttggtatctaatccccataacaacaatcccaataaaagttgcaagtcctaaagaaaaagtaaatgttaaagatgatgttggtggtgaaataccaccaagcaagctaactaagttgcttgatactatgtacagaagcaacattaaaaagtagggagcaaatttcttattttcctctcctaaaagatctgctgttgtatcttgtacccaaacaaacaacatttgaaataaaagcaaaaaatatgaattattttttaaagaatctgctttttttaacttaagcttataaaaaataaaaaaagttagaagcagtacaaaaacaataaaaataccaagaatttgatcagtaggggcaaatggttttcaaccgctaattggtgagatatcaaaaatactttgattggaaatgaaatctatttgattagtttcttttaaaactatctcccgtggcgacatgttttcttttcgatttagatattaaattgataaaaaaatattctaaaggtaaccaaacaaatgataacactaaatttagtattggaaaaaacaatgttgaaattattgttgcaatagtgttaaaaattgacggagtgacaacaaaagaaataatcacaggaattaaataaattaaatatctagctgtgaaaaaaaatgcaaagaatgaaactgctttttgctttttgacatttttcaaacttgcaaagaaagatgctaatcttaaaactgatagtgaatttaaaacagcaaaaggtaatggcaacattcaaccaaataaaatgtccaaattattgccttttgttaaaacaacaactgctattaaaattagtacaaataaccaagctacaaaaataattaaggtaataatttttgcaacctttctattgtttcaattgaacaaaacttttagatgttaaagtttttaggtttaatgtttgtaaaggtatttcaacctaagtattttcctttatcaccaagttcaatttctatgtacaacaaacgattgtatttagctattctttctgagcgtgacattgaaccggttttaatttgaccagtttgggcagcaactgccaaatcagcaatagttgtatcttctgtttcaccactgcgatgtgaaattacttgactccagttagctttttttgcaacttcaattgtttgaatcgtttcactaatagaaccaatttgatttaatttaatcaatatcgagtttgttgtattttgtgcaacaccttttttagcaagttctgcattagtacagtaagtgtcatcaccaacaatttgaatatggctacctatggttttagttaattggttcatcccttctcaatcattttcactcaaaccatcttctattgaaataattggatatttttttgttaatttttctaagtaagcaatcatttctttgcttgttaaactccaatcctttgcattaaggatattagcttttattcctttcttgaaaacataaagttttttatcttcgtcataaaactcactagcagcaacatcaatggcaatagcaatatcatctcaaggcttatatccagctaatttaatggcttcaaccatgatgtcaagtgcatcttctgcaagttttaagttaggcgcaaatccaccttcatctcctttatttgtgtttaatccacgcttttttaaaagattttgtaaagcatgaaaagtttcactagccatttttaaagcttcatgcatctttttagcacctaaaggcatgatcatgaactcttgaaaatcaatatagttatcagcatgagcaccaccattaattacatttaacattggcacaggtaaaacaaaatttgttgtatttaatccaattaatttatttgaaatgtattgaaataatgagctgttttgtgcttttgctgctgcttttgatactgcaagtgaaacagataatatagcatttgctcctaattttgctttgttgggagtattgtctagtttaatcattgcttgatccactgttaattgatcaaatgcatttaagccaataagcttaggggcaataactttattaacgttatcaacggcttcgttaacgcctttaccaaaataattttttggatcattatcacgtaattcaattgcttctttctcacctgtagaagcacctgatggaaccatcgcttcacctacatgaccagatgccaatttaacaacacaagctactgttggaacaccccgagaatcaaaaacttgataagcaaaaatatcggttatttttgaattgatgtttagatttgaacttcccatattaaatagaaaaatattgttaataaaattattatatgttttaagatttctattaattcaagtaatatgaaagaaatttattttggtggtggttgtttttgaggaatagaaaaatattttcaacttattaagggtgttaaaaaaacatctgttggttatctcaactctaggattagaaatcctagttatgagcaggtttgttctggttatactaatgctgttgaagctgtaaaagttgaatacgaagaaaaagaaatttctctttcagaattaattgaagcactttttgaagttattgatccaactataagaaatagacaaggtaatgatattggaacacaatatcgtactggtatttattgaactgatagcagtgatgaaaaaataattaatgataagttcttaaaacttcaaaaaaactacagtaaaccaattgttacagaaaataaaaaagtagaaaattattatcttgctgaagaataccatcaggattatttaaaaaagaatccaaacggttattgccacatcaaatttgactaattaaatatttcaggatttttaataaataaaaaggatttaatgatgttatagcaataatcattaatccgttcaatatgtttaacagaagctacaagatcaattaagaaaatcctttcagtaacctcatttttattaatggtttcatagtattttgttaatacaaggcgatattggtgctcaaattcaataatagttttggttgcattttcaaattgtaatgtaagtggcttttctttatcttgtaaactttcaaaggttttcttaaggttattgagcgcactttgatgcaaagtaactagattattaaaaatctttatatcaagatgcaaataatgttctataaacttagttaaattattagcataatcacaaatgcgttccaagtcacgacttgacataattattgtgattgttaggcgtaaatggctagctaatggagaatttttagagattgtccaaattgattcattaattaatttaaattcagacctattagattggtcctccatttcataaatagttttaatcagttctttgcgtttttctaaattatcttcacaaagtaattgatttaatgtttcatgtgcattgattacgtgcttaaaatactcaaaaaaaagctttaataatttcttttctgaacgctttaaaatttggtaattaatgttttccatagctaatttttcccacttatataactatttgttgctttttgcttaggctttgtaaatatctgttttgtagtgccttgttcaattactcttccatcagcaaaaaaaatcgtttcatcagttattctaattgtttgagccatagagtgagtaacaataacaattgtgaatttttcttttagttgttgaattagaagttcaatagagtttgtggcaattgagtctaaagcactggtaggttcatccatcaaaagaacatctggttgtaaagcaatagcacgcgcaatacacaagcgttgttgttgtccaccagaaagggtgtttgcattcctatgtaaattatctttcacttcatctcacaatgctgctgatatcaatgcctgtcttactatttcattgatagcatttttattgtgaataccatgtgctcttatgccataagcaatgttttcaaaaatagaaaaattaaaaggagttaatttttgaaaaaccatgccaacactagtgcgcaatgttaaatcattaataattcctgaattgatattcttaccaagaaaatatatgtcacctgttcaacgtgtgttttcatttaaatcatttaatttatttaagcacctaataaaggtggatttaccgcatcctgatttacctattaaagcagttattttattgcgtttaatgtcaagattgatatcaaataatacttgtttgtttttgttatatcagaagttgaaatttcgaatttcaaatacatttttttcatcaaaatcctttttaatgacattatctttggtgtttttaatctttattagacggtttaaaatttcaatttcattcttaatacgggagatttcatttgcatctgtttcattatttaaaccagtaattttctttttatattctttgatttgttgttcataaagctttcggtaatgcttaattttttcaagcttcaattgaaaattttttcaaagtgcttttatgttcttttccataatttaaaggactgaaatttacttttaattactagccatttttgtttatttaacaaaaataaactcgggattaaataagaactgaaaaagattaaaagaattaagaaaacaacagagaccaatgatgtttctaacataacacttattgcattgctattaatagaaaataactgtccatatatccttgttgttagtgtttgacctggcaatgacaaatgaaataaattactagatgataaccctgaagtgataaagaagggtgcagtttcagcaataattctgttgattgacaaaattaatgcaactattaatcctttcaaagcactaggtaaaactattttgaaaataacttcacgtttacttatacctaaagcaaaagcactaattcttaaatcccaactgacattatttagtgcttgttgacaagttcttataaggaagagtaatataacaacactaatagttagaatgcctgctattaaactagtaccattagctcctccagcacttaactgcaagactcttaaaaagaaagaaagtccaaataatccataaataatagatggcattgaacttagtgaatcaattacaaagttaaaaacatttttaaccacttttgaattattgtactcgttaagtcaaattgcaattaaaagtgctagtggaaaagtaatggtgatagtaatcaaaataattactagagtatttactagtgctctgccagttgaatcagcttcaaatgaaaaaacagtagaaccattattattaatagcaacacttccattaataaatacaaacagcaaaattgctaacacaaatccaaaagctaaaaaagtacaaattaattcctggaatatttttaaaaaataattaagttttattcaaacaacactttgaagcctttctttaaaaaaaagtgaacgttcattgatgttgtttacttttatttttttaacactttgtcttgttgatgttaaatcaacaaaaagtgcactaatattattgggaatgaatcacacaacttgataaataaaattactaatcttttttaaaaagggatagcgttccagtgtttttggattagctgatcaaatggcaaagaaatttaacaatgaaactaatatcaaaattatgattccaaagatatataaaacaccattaatctgttcatctccattttctgaaaaaataaaagtggaaataactgatcccagtgtttttaaatcagaagtaaaaaaacgattgttgttaattacctcttgatagttaacactctgcaaaacaaagttaacagccattgtttcactaattgctctcgcaaaggctaaggtcaaaataactgttaattgtggtttaatttcttttttaataattttgtagatcgcacttgttttattttcccctaaggaaacaacaacactaattagatcgttatttacataagttaatgtatttgttgttaatgaaataacaataggaatgatcataaaagaaagcatagctatcacatttaaaagtgaaagcggcggtaatttcaagatatcccgaaagaaaatgcttaatatttgtgatgcaaataatccaaaaattacagatggtattcctgaaaggatatcaataataagtgaaagtttttttcttatttttggtttgcatcgataaacaaggaaaaatgaagttctaacccctatataactagcaataattaaagctcctattgatacaataaaacttaccaataaggggaatcaaattcctgcctgtttattacctaaattaaattcaagattaaacaaggactttgcaaaatcaggtccaatttttgttgcttctgttaaaagaaaaacaaaaaaacttataaataaaactaaaaacaagaatgctaaagtctttgaaaagattcttaaaagattctctttttttaaacgttttttaatcttcttttgcactaaaaagctccaaagataggattactaaaagcaaagtcatcaactcaaaaattttctaaattcattggtgatgagtcatttgttttaaacatcttctttttctcatcttcagttaattgcaaaataccaaattcatcataaatatttttaattacatctttttttccattaaaaaataatcaattaaaaaaagttttaatttcatcaatattcttattctcttcagaaagtgaaactattgaatttaaaggacgtactcatttatactcattttgggaaacagtttgattagaaggcaaaacttccttattctcatatttaattggtagtatctcaaaaccattatttttaatagcttgaaggttgttttgaataaatcctaaactaaggtaaatcatcccgaaaagattaggatcttgtaagttagttacaaaagtattaaaagcttcaatatttgtttcactagtaggtttagcaagaggtccataattaataattcctttcaaaatatctctagtttgagaatctaaagttttatctgattttaaggcggaaaaatttaaaaaagcttctgctgttcctgaagcaaatgacccaccagttcttggaaaacttgttaaagggtaatctttttcatttgacatattttttgtatccttttttacaaacttatcaatgttaattgttttaacaccagcaaataagtcgtagagatcatttatattatcttttgttaaaagtaacttaccttttaactcctgtggtgccttataaattactgcaatagcatctttgccaatagttaaagttttcagctttttatctcttcattttttttcattctcttttgcatattccttagggtttttagagacatttccgatatcagcaaagccgttaatgattgctctgattccagcatttgatccgcctgcttgcacactaatttcaacaagcttatcattgtcattattttcatttagaacataataagaacttaatttatttagtaaaggttgaactgaagaagaaccaacagcactaatcaggtttatgttagcacaaccactaagaaaaaaagcagatgctaatgttagtagcgtcaatttaaagaaatttctaaactttagcactttttaaacagattaaatcttttctaaagagaattcgaattgacactcaggttattatttagtctagttttttcacaagccaattaatttaaatgaaatgcatttttattaattgcaaatttaatttcttttcttaacaattttcttttttcttcattttaaaaacaaaacagcagaacttatcattaagctaatgataattccaaaaatgactcataatattaactcaacatttgtatcttgttttttaatttcatttttttctaacttatcaacttcataggatttatcttgagatttaagattaaaatctggaactctcttgaattgcaggttattttgttttagataaaatgataatgctttgaaaagttgtgtttgattttcactagtaatatcaaatcaaatagaattatcaaaaccattggcatctacaattaaaagtgtttgattatttgttatttttaaatcatagctaatactaaatacttggttatcattattaacacctttaataaataatttttttgatctaacatcgacatcaaaaactaaattaaattgatttttattttctactaaatggatgttaataaatttattctttaggttaaagcggacgtttttagttgtttgcaatcttttttcacttagagtaatattgagtttatcaactagtaattgttcgtcatttaaactaaaaggttcatgaaaatcaagttgataatcctctagaaatttaaatgaagatgactttaaatctaattcagcaatttttaagttatcaactgataaaaataccttgtctttttctaacttaaatcccaggtcatttttatcaacaaaaagtttgttagtatgaaatttaaataaatatgttcttaatttagggtttttttgattttgtgatagaaaatacattttgtctttaataatttcagaatcactttcagaaccatatttgaatagttcattgctattatttatttctgctaaaacataaaatatacctttcttttcattagtaggctctagatgtttgaaatattttttagggttatccacaaatgttaaagagttactgttgatatctaaatcaatattcttatccttagatttaaaactatttttgataatgaaagccatttgtcttttttcataatcattaaacttttcattacgttttttaagttcagcaacattaaagttttgaacatttttatttagtggaatacgaaaatctttagcaattcaacgctgttcattaaaatcttttctatatttaaatttgtattcaaaaccatccttagttcttttgatagttgaaagttttttaatactgtcaaacagtggttcaacactatagttactaatattttctgattcatatccatctacaaaaaaattaagtgctaaaaattcaatattcatttcattatctgctttctgtttttctgttaaaaactcctcaattgaacttaaatcaaaataattcttgttatttcttaacaatgttatttcatttacagaattaccaatttttactttaacagttaatgttgatctatcaaaaatggttttgaccattcttggtaaatttctaataaagaatagttcttctttattgtttggtgacatttgcaataggttgtataaataatctaaatttggataaaaattactttgattattggttgaaatattaaagctttttaacgcttcatttttatcaattgattcatcaattctttgattaattaaactaacttctttaattgcatttatgaatttatctttaaatttaatagttggtttaatttttgtacctattgtttctttatttagagttttttcagtttgactaacaagcgaattaatatcaaattccaactgtgaaattcaaagctttgaaagattactgaaactaattggtaaaacttcatcaggattattttgccttagataaaaacttatttgatgatgaacaacttcttgttcaggtaatataggtgtatgtttaaaaatatcccatttactgttgaatgcttcacgtctactatcttcagtttctggtctaactactaatccattacctagtcttaatatcgtttgagttatttcacgattattagtaaatgcttcaatgatttttctatcctttttcattttctctttaaactcatttatactcatccaatgagcatcaacttgtttgttgctgttaatagaaaaaaatcaactgcttctaccaggaaaaggttcgtttcactgagcgttattctgttcaaaaactggaggaactttcactagttctaaatctcatcagaaacgataagctctaattggtgtcattgctaaacctcatcagaaatctggagctacaaaaatattattttttcagtcagcaaaaaatcctcttgattcttggccaagataatatcacataggtgcattaaaatcaattacataattaccattattaccttttcttaatcatttaatatttctaataacatcttctggggttggtttaatcattcttaaagtcgatcctcacatgtgaacaaacttagcttcaataaaatatgcttttttatgactgggctttgtaaggtctcaaaaataaggattatcaggtttatatcaacttttgtttcaagaaccatctggatttgtaccagttatttctatattcctagaaggaacttcggttcatttttcattagtatgaccatctcttggaaaaaaattagaaattgcttgactatgaaaataaaatctctgctcactatggatatcagatgaccatgagtttctaattccagggtatctaaatgtagatgaaaatgcatgtgcaatataactactctcaatttttaactttatgttctttagataataaatattgttgtatcagtgaaagttattatctctaataatttgtttgtaattatcactatatttattaactaattcacttcattcattcgaataagtttttgcaaaataattattttgattaggtctttgaattacttcattatcaaaattaaagctttttcgaaaataatcgttttttaaattaaatccagctgtatagcttctgttttgaattgtgtttggagagagataaagattagtatctaccaagtttttttcaagtgaagcattagctaaagcaacgggaaaaagaaaagaaactaataaaggaataaaaagatatgaacgcataatttatctcattaaataaatgtgtatttaatgaaatattgacaatttttattgctagttcttgttaaaaattatctcttgttttattttttatcatcttttgttttttatttcacttatgaaagtaaataaaaacagtgataaacaaaactaaaacactaaaaccaataatcaaatatactataatatctgtttttttatcttcactattagattgaataattttgtctatttgaaaactatagctgtttttctttaagctaaaattaggttcttttttaaattgaaatttttttaatgagagaaataacttaagctcatttttcagtttctgattatttttcttatcaagatcaaaccaaatatatttatttaagtagttatttgttgttctaatttgcaattcattttcatttttgatagcaatatcataaacaaggctagttaatctatttttacttatattaacttcaatattgagctgatttttaattgcatcaacatttaaataaaaatgaagcgaactatttatctttagagtagttaatttgatctctttaggaaaaagatctaagctagatttctttttatctattaaaagattcatttcacttaaagccaaatttagttttttaattaatagttctttattagctaaagaaaaataatcatttatatgaacttcataactttcaaaaaatgaggtattattttcttttggattaaattcatctatttcaacattattaacaattacccttaatttatcaccgcttgatttaaatcaaatatcattaacatttaaaactaactttttggttctcatttgaaaaagataagttcttattgcaggaaagtttttattttgttctaagaaatacatcttatctttaatgatttcgctatcatttttagaaccccatttagttaaatcattactgttaattatttgtgctgaaacatagaatataccatttttaacactgggcttaattaaagattttttaattaatttctcaggatcttttatgtattttattgtagcggatgaaatatttaaattgttttctttttgagaagtaaaactatttttaattgcatatgtaattggttctctttgataactatttaatccgtttttttcaatgtcattaacactgaaatttttctgatttgtaacaataggaattaaaaaatgatcttttaaaatatgatgttcattgtattcagatctaaactttaaactatattgaaaaccatttttagttttctgaatagaaggcaaatttttaactgacttaaaaaaagaatcaactggttgattttttaatgttcatcctgttttattcacaacaataaaatcaaaagttaaaaactcaatttcataaaaattaataccagtttgatcagcatttaagaaattttcaacatcacttaataaaaaaacgttactgccattttctataaaagtaattactttatttttgccacctatctttatatttatcgtgatggtagtatctttaaaaatacttttaattaggttgggtaatatccgaataaaatttaatgttttctcttgttttggattaatgttaattaaattacttaagaaaaatattgcatcaattctttcatcttttggttcaaaatcaaatttagattcttcctgtttttctaataaatctaaagcaaattgaaaaaaagttttatctttatttgctaattgatcaaactcttgatttagcttacttaccatttcaattgcattagaaaattgatcactaaatttcagctttggtgttatttttgatcctattagttctttgtttaaaacagtagttggattagctattaaagaatttgaatcaaattcaatttggttaacaatgatcttagcaagttgatttgttgctatagttaattgattttgtgattgaaaatcatctttaactagataaagattagtatcaatcaacttactttttatggaagtgttagcaaataataagggaattatcgcaaaggaaactcactttaaatagcgttttcatgacataataagctttatattccataaattaaataaaacttattaagtgacagtttttttactaacgcttagtaaattgtggtgcacgtctagcaccatataaaccaaattttttgcgttccttagcacgcttatcacgtgttgttaattttttggtttttaataactttttaagatctggattaaattttattaaagcacgaacaatacctaatctaatggctcctgcctgcccagtaaatcctccacctttaacaacaacattgatatcaaagttatccttaagtttggttaactctaagggttgttccatatcttgaatcaccaatttatttggaaaataatcgctaggattacgatgattaatggttattttacccttatctttgctttgatataaataaactttagcagtagaagatttacgacgaccaagtccataaaaagattttttatccatatcttttaacttcaattaagtaatgttggtttttgtgcttccatgttgtgcttatcattcttaaaaacatgtactttagttattaatcttctgcttaaacgattatcaggtaacattcccttaacagcattgaaaacaagtttatctgaatttttgtttatcatatcccttccactagtttttttaattccacccatgtattgagagtgatgatatcaaaactcattgtcttttttatttccagttaaaaccacttgatcactgttaataattattagatgatctccacaatcttgattaggagtaaaattagctttattttttcctctaattaaatttgcagctttaactgctaatttgcctaaaaccaaaccactagcgtcaacaagataccacttcctgtttttaatggcttcttcctttgtaagcatcgatgttttttgcatatatttagatacaaaaccgcattctattttaatattattacttttcttcaaaaagtcctttaaagtatttatccaccattttttgtgataaagagcgtttcttttcttttaaaaaaggcttagctaagttttccaattgggttaagttcaacacttcagtttgatacttttgattttttgtttcttcagtaattgttgttttatattgatgctcactaaaagatgctaagaataaattttggttaaaaatctgaaatatagttgcttgtacattaccttcttctattgcctcttttcaaagtctcatagcaattttttgatcttcaaataagataactatcccaaatgaagaagcttttactattttggttgctttcactatatcacgagcactatatttgtctataaagttattgaaataacttaaattattctgtttatctttatcattaaatttagtttgaaaaacacttaaaagattttgaaaatgattaattcatttattgtcattaaatgcattaattgcaagagcaatattggcaagatttagtttgcttgtatctaagaatttgttattagtaacttcatcatttttaggtgtcttttctgatttatctataaaagatttttcaaataaagaaaagtgcttttggtcttgtttgtgatttgatttttttatttttttcttttccaaatattcagtttctaagtgtagagatttttcattacttggtgagcttattgttaaaggtttttgattaaaaaattcattatagctaataacaatagcttttagcctatcaattaaagttaattgacttaaaccaaaattagtattttcttcaatggccttaattaaaaacgcataatgctgcttttcaaaattaagtgtttctatcattgttttttcagttgaatctaaaacattaatattttttagttttgcatacgcatataaattaactgttagcgcaaacaactctcttaagaagtaagtgaaatttagaccattactttcaaaatcatcaagcaagttaaatgcttcttttatatctcctgataaaactgctttaataaaagtaaattttgcatttctatcaacgatattaaatgttttttcaacatcagtaatactaattttttcactatcagagaaattgctaattgatctagtaagctaagcccatcacgcaatgaaccttgggataaatcagcaatttttattaatgcatctttctctatcttaatcttttctttttttgctatatcatttaatctttcaaggattaaatcactagttatttttttaaaaaagaagctttgacatctggacaaaattgttaatggaatcttgttaaattcagtagttgtaaaaataaaaagaacataaggtggtgattcttctaaagtttttaacaagccaccccatgattgggtggttaacatgtgtgcttcatctaaaatataaaccttttttttaaatgtgaagggatgattgaaaacattttctaccaactctctaatatcattaataccatttttagaagctgcatctatctcaactatatcaatggcactattagtgttaatacttttacacacatcacaactattacaaacatcaatttgatctcaatttaagcagtttatcgcttttgctattatctttgcaaaagtagttttacctgttcctctttcacctgaaaagatataaccattaggtagtttatccctgttaatagcattcaccaagatttttcttatcgattcttgtcctagggtttgtttgaaattgattggccgatatttttgataaaaaacttggtgcataatttttaaattgaatctggttttaaaattttggacaaatattgggcagtataagatttattaacttggtttataagttgttcaggtgttccttgagcaacaatttgaccaccattgtcaccaccttcaggacctaaatcaatgatatagtcagcaaccttaataatatctaagttatgttctataacaactactgtatcaccattcttaatgattctttgaattattgttaatagtttgtttatatcttctaaatgtaagccagtagagggttcatctaaaacaaacaaagttttaccagtagattttttttgtaaaaacttagataacttaattctctgtgcttccccacctgaaagaaaagtgacattaatacctaattgcaaatattctaaaccaacatcacataacaaccttagtttacgtgatatatttgggatagctttaaaaaattcataagcttctttacaagacatttgtaaaacatcaaaaattgattttcccaaatatttaatttccagtgtttgtgaattgtacttcttgccattacatacttcacatttgacataaacatcaggtaaaaaatgcatttcaatgcgaatcacaccatcaccaaaacacttatcacacctaccacctggaacattaaaagaaaatcgtgaatttgtatatcctcttgctttagcttcttttgtgttggcaaataaatcacgaatatcatcaaaaacactaatataggttgcaggattagaacgtggtgttctaccaattgggtcttgagagacaacaattatcttatcaatgttgttagcaccaattatttccttatatgtatcttttttaacacctttacgataaagaattctttctaaagctggaactaatgtttgattaattaaagaggattttccagaacctgaaacccctgttatcaaaaccaatttatttaaaggaatggtgacattaatatttttcaaattattaactttagcacccttgataataattgttttaccattaccactatgtctattttttggaatggagatttgttttttaccactaagatattgtccagtaattgagtttgagttttccattacttgtaaaggtgtaccgcaagcaactaattcaccaccttcattacctgctttaggaccaatatcaattaaataatctgccgctaacattgtttcactgtcatgctcaactactaataaggtgttacctaaatcacgcattaccatcattgttttaattaaacgcatattgtctttttgatgcaatccaatagaaggttcatccattacatataaaacaccagtaagttgagaaccaatttgggtagctaatctaattctttgtgcttctccacctgacagcgtagaagctcttcttgcaagattaagataatctaaaccaacatttttaagaaaagaaagacgattaataatctcttttaaagctaattcaccgatcttcttttgctcatcatttaactctagttttaatagaaaatcaatacttttatcaatggaaagttcagtaaagctaataatgtcaattcctcctaacttaacacttaaagcgtcttttattaatttttttccatgacactttttacatgttatttcagacatgtatgcagaatatcattctctacttacttggctgtttgtttctaggtgtcttcttttaattaaattagctatcccttcataatgctcaaagcggatattcttagcacctgaattggaaattgtttttatttcaataggttcatcacttccttctaaaattaaattaagttgtgacttatctaactgttcaattggtttatctaatggaattttatagtgattaactaaagataaaaagcgctgtcaatccaaagaagttccatgcacaatatttttaaaaatatcaatggctccttggttaatagaaagtttagaatcagcaattatcttgtctacatcaggttcataactaaaaccaagtcctttgcaatatgaacatgaacctaaaggggagttaaaggaaaataatcttggttccaattcactaatagaaaaaccacatttatcacaaccatgatttttgctgaaatttaatattgttccatcttccttaagaacttctatcttgccattagttaacctatcaatggtttcaatgctatcaactatccttgaataagtttgattatctttattgatgataattctatcgatcactacactaatgttgtgtttagtatttttatcaagtttaatttcatcatctaaggtgtaaatctggccatcaactaagactctaagaaaacctaattgcttgtatttaataaattcatttgtaaaaatgccgcgctgatttttaacagtaggtgctaataattgcacctttgatttattaggtaaatcaaaaatctgattagcaatttggttaattgtttgcgtttgaatagaaccatgaccattaggacaataaggggtcccaattctagctcataaaagtcttagataatcatagatctcagttactgtacccacagttgaacgtgggttatgtgaagtggttttttgatcaatggaaattgctggtgataatccttctataagatcaacatcaggtttatcactgttacctaaaaattggcgtgcataagaagatagagactctaaatatcttcttctcccctcagcataaattgtgttaaatgctaaggaagatttacctgatcctgatagaccagtaataacaacaaattgatttttagggatatcaatgttaatgtttttaaggttattttctctagcacctttaacccttataaaatcattattttttcattccggtttcaaagtcaatgtttttaattgaaaaatttttaactaacttattattaggatcattgaaaataagcgcaataccttgtttattttgatatgagatcaaaagtccacgaatgaaattataagcgtggttagtgaaatcattgcagcagtttatcattagtaacttaggatttaacaaaagtttaaatagcaagtaaagctttagactttcatttttgttaattttgtttaaatcactaaataacattcagctgctaataccattctttttggtttgatttatcaataaattaatgttgttaataaagttaagttttttaagatttttttgtgatcttaaaaagaaattaattgtttttaattgtgaattcaaaacattaagataaagcttatttgaagcttctaaacgattgatattgcactcttctgaatcaataaaaaaagttctcttaattttcttgtttgtttttttaagtcttaagtgcaatgttttgtttaaaatacaatatcttttcatgatgaatttaatcttttgtaacttttgatttgtttcatcgcgaaaaattcacttaactaaattaatgtcttttaaaagtaatttgtatttttgtttgcatttttttagcttttgttttagatcattcttggtttctttatttgttgtatctgttgttgaagaaaaaccgcgtgatgctaacaggaaactaacaggggtttcaaaatttagatctaaatatttattaataactttgtcaactagaaaatttcactttggggagtttaaatcattttttaacttatcttttagcaaactaaaatgtggttcactacgtccttcatttcaaataaaatcattagaaccacaacttaaaaactcatatttattaaagaattgttgaaattttttacttaggctatttcaaagtgaaataagaacaaaatacaagttatttaactcatatttttgtcagttaattttttgataattagctaataagctttcataaaaatattgctttatttgaaatgcaaagttaaaagtctccaaactttttctcatgctgattaaaccaattgcatattgcactgtatcaataaactgtttgaaaactgttttttggattagaactgaaaaactgttattatgcttacctctataatgattttgatttaataagatgttttcttttagttcattaaccaatttttcatgaacatacaaattgtttgattgtttaacaaaatttttaataaaagataaacgtgctttgatcaaaaattcatgaacctcttttttcgttagaatgaaacgtgcagacattattttaagttcttgattaattgtctggtactttcagttcaaattaggacctgattttaagctgataatttcttgataaagattttgaatattagcaaagattttattgactaaattaatactttcatcaatagtttctacaagtaattttggagaaagtaaatccattttcttaatttctttcaaaagtaaaattcttgttttaatccgcttagatacaatctttttttctaaaattctttttctataaaaattaaaaaaacttcttcacttaatctttcaaccactaaaaattaaagaaaaggtgaatgaattaattaattgcaaagcatttttatgttgttttgagaatgttttcttagcatcaaaaagtctttgtttagctctttcaatttgcaatttttcaaaataactgttatctcgtgatttagcttcataagcagctattttcagtttgttttttaagttatttttttgttcgttcaatgcatagtaacgctcaaaaaaactttttattactttgttattaaaagtaaataattgattgaaaaacatgcaattaaaatcaacaagttctctttcgtttttttcaattaaagttaaaaaattattgtattcaaaatcaacttgttcaaagtagattgaattaataaattttgatgtaaaaaactgattaatgactttactagttttttgattaacattttcaattttcaaaattgaaaacctaaataaatcattaagcgcattaaaacctaaaaatcactttaactgtttaggtatattcactaaattaaagtaattttgatcttttttataacttaaatcttgttttagaaaaatgctaaatgaattaggaaataaccacttatttttatttcttaaatctatctcttcacataaattaaacttaattttttgaagcggtaaatattgatggttattaacaagcaaaaacccagaatagggttgtttatttaactgtaaaacttgtgaaagggtttttcattgtgcttgatttaaattatcaatgagatagttaccatacttaaataatgatagctttgcaaccccaaaatagttagcatctaaaaaggaggtacgaatcattaataatgacaaatcaacccactgttctagattatcaaaaagagatattttctttagcatgtacctttcaaattttaattgctaatctttaaggtacttaaatagaaataatagttgaaagaattaagggtgcttttgatgtcatcttggtgaataaattcattactgctcgtttaatagaaaccttcaattcttttgaaatttctttacctattcgttttttaatcgtggtgaaatccttaatatcattaatttgttttttaattaattcttccatttttgtttttagtttatctttttctggtacatctaaagatactcctaaaaaagaataagttatctcatttaagaattcactctttttttgatcaaaataaatgattatgatcacaactccagattctgacatttgatcacgttcaaacataatgctagctccaatttcttgtaatccagcagaatcaacacacttaggatttaatttcaattcattttttttgctatctagttttttgttttcaatagttaaaacttcaccgttaaaaagaattaagatttgattttgctcagcgccagcttgttttaaaaccattgtgaagtttataaaatccctataaagtccaccagttggaataatatattttggttttaaagaactaactaaaaacttcatatcttcatcacttgcttggatagaaaggatttctctacctaagttgtaataactaacttcattacgtgcaatatcatcaaggatttgtgcttctatctcttcatagccagcaactttaggagtcataaagataaaagtatcactcttacgataacgaattctttcatcttcgttcattccaattttgaataatttagcatacaacttatcaggtggtgaggtgagaacaacaatactgttggttgaattgttaatctcctcaatagaaatggtatttaaatgcgtgttattaaacaatttttgacgcacaattgtgttaaagagatgcacaaatgattgtgaatagataataaaaggacgattttgcatccttgcaatctgggcaagagtcataacactgtaagcatttgaatcataacaagctacaaatattctgcctttggctggagttatgatcctgtttaactgttctaatgacttgtgtttaggtgttgtaaaaccactgtttctaccaactaaaccaactcctgttattaataacaatgtattgtcagaaagtttagggataatttgatttagttgattttcaaaagcaatgttcttatcatttaaaacaatgaaatcatcaataaaaacgatgtaaccattatcagtatttaaagcaaatccaaatgatgatggtaaagaacttgatactttaaaaggggtaatagaatgattagaaatttcgattgtttcaagtggttttaattcatgaatttccaatttatcacgtgcaatattaagtttgttttcattaattttgcttttaattatagaagcgcctattgaacttgtgtaaataggaaaaaatcctactgtatggaacaaaaattctaatgatcctaagttttcagtaatggcattacctataaaaatacctttaactcttgcttgattttcttgaattcaactaaaatcaggaataatttttttaacacctaaaactgctgttgttggtgttaagctaccaacattaaagataaacacatcattgtcaatttcaagcacatagcaatttttaccacgttcatcttgaccgccgagcgcaaagaatttaatcttagccatttttaaccccggaggtttaaatttttaatcaaatcacggtaggtttcaatattacgttcttttagatatttaagtagccgttttctttttgatacctttgtatataaaccacgcttagaaataaaatcctttttgtttgctaacaggtggtctgttaattttttaatctgatctgttaatatagagatttgtacttgcacactgccaacatcgtttttgtgaagttgatgagccttaatgatttgttctttatcaattttcattaattaataaacacgttgaattataacaaaattagaaaacggctcattgccaaggttagaagtaataaattctcctacttacttattacttataataaatatagtttttatttttattaataaattctctcgatattttcgatatttaaatctatacatctaaacaaattaacaaagccatttaacttatggactcaacctttcatgagcttgggatctctcaaactttaattgaaacgcttaatgcgcttcatattaataagccaacaaaaattcaacaaatctctatccctcagtttttatcagaaaaaaacttaatagttcactcgccaacaggaactggtaaaactgctgcttttgcaattcccataattgagaagctattaaaagaagatcaaacagcaaaaccaactttagtaattgctccaacaagagaattagtagaacagattaaaaccacattttcaaatattgctaaaaataaaaaactaagaattattagtttaattggtggtgtacctgcttgaaaacaaatcaaaaaaatcaaaacaaatccccaaataatagttggtactatgggtagaattatggatcttttagagcgtaaagcaattcattttagcgatttagaacacctaattattgatgaagttgatttaatgttagaccgtggttttaaaaaacaaatttttaatttactagaacaaatcaattcctttaaacaaattgctgtttattcagctagttacaaccaagaagctattaacattgccaagcaaattactaataatgggatctttattggatcacctgaatttaataaagacgcaaataccaataatgataaactaatcaaacaatttgtttgttatctattttcagatcaaaaaaagcaagctttatacagccttataaaaacagcacaagttaagtcaatcattgttttttgtgacactaaaaaactagttgatgatcttcatgtatttttaagaaaaaatgaattaagaacttttgcacttcatggtgataaaaaacaatttattagagagagaaatcttaaaatctttgccaatacaaaacaacccacgattctagtaactactgatcttattggtcgtggtatccatgttgaagcaatcgatatggttatcaattattcagcttgtttaaatctagaagcttatataaatagaatgggaaggactggcagaaacaatcataaagggacatgtgtaactttctgcacctcacaagaaaagaaagtctttctgaaaatggttgagaaaatcactgataatcgaatagctgaatgtaaacaaatggaaataaagttaattcctttaaaaaataaagctaaaactaaaaaaggtggtatttcacttgattgtgttcagaaaatatatgccaatgcaaaaccatatgaccgtaataaacgtgtccctttagcaagtgatcttttcaaaagtcgtatgcgccagcctgaaaaagctatgcaaaagcaaaaaattcatgacaatgactgacaaagtaatatgtaataacaatttataaaatacttgtatggcaaaaaaagaccaacttaccttaagagggcctttgtatggcaataatcgttctcattccaaaactattacaagaagaaaatggaatgtaaaccttcagtcatgcaaaattaaagatactaatggtaaagtaacacggattctagtttcaactaaaacaattcgtacccttaaaaaacaaaatcgtttctaatttaaatttaagttaaacttaatccataagcatatatggataaaaaatacgatatcacagctgttttgaacgatgatagttctattaatgcagtaagcgataacttccaaataacactggatgcacgaccaaaagaaaaatctaaaggcattaatcctctgtcagcttttttggctggtttagctgcatgtgaacttgcaactgctaatgcgatggcagctgctaagatgataactttgaacaaggcactgattaacatcaaaggttatcgtttaacaaatcctagtgatggttattttggcctacgtgaacttaacattcactgagaaattcactctcctaatgaggaagaagagattaaagaattcattgattttgtaagtaaacgttgtcctgctcataacactttgcatggaactagcaattttaagataaatattagcgttactttagtccactaaaacttattaaaaaagcgaaaaatacctgtaattttgcaggtatttttttatttaaaaaaaggataaatttaagaaattaaatttcgctttagcagtcgataattgatcatatgaaaaataatattagtgatgtaaagttgggactgttagcagcaaaaatttattgaaaatcttgacgctttttagagttaacagaagatgacattatctctattgcacttcatgcagagcaagattctaagaagcgttttaatcctgaatttggcttaagttttgacaactatctcaaattaaatggagcaaatttcattagatcaagttttagaagtatggtgaataaagttgaattgcttgattctaaaagtaaatactcattagaaaagcaaaacacagttctaaatacacctgaaaactatttacggagtttagaatttaaagaaattattactaaagcttttaataaagctaaaaacgatcaagagagaaaagttttttctttatatgtaaagggctataaaaactttgagatagcaaaaaagctcaatattagtcctagaagagtgagatatttattagatctttttaaaagctacatcaaattgctaacagaaagatatggatattaaataaagatatttttctttttaaagaaattttctactagttttctaacagcactatcactagttaatttcaatgctttttcaactaatgatttacattcattaattgttattttagcaataaccattcttgctttaaacattgaacttgcactcattgataactctgttaaccctaaacctaaaagcaacggtattgcatattgatcactggccatttcaccacacattccagttcaaacattatttaatttaccaccttctacaactagtttaattaagcgtagtaatgctggatttaatggttggtatagataactaacgtttttattcatcctatcagcagcaaaactatattggattaaatcattgctacctattgagaaaaaatcaacatgttttcctaagcaatcagctgctaatgctgctgatggaatttcaatcattattcctaatttaaatttcttagtttcattaaattcttgttgaacttttgttaaaagttgcttaacttgaactaattcatcaagagttgcaaccattggaaacataattcctaaatttccataatcagaagctcttaataaagcacgaagttgggtcttaaaaacagcttgtttatctaatgttaaacggatagcacgataacctaagaaagggttatcttcatgaggaaattgaaaataatttagttttttatctccaccaatgtctaatgttctaattattaccaaatcatttttagctttttgtaaaacagttttataagcttcaaattgaactgattcatcaggtcaatcttgactactcatatagagaaattcagttctaaaaagaccaattccattcgtgttatactcaactgctaaatccatatcttttacattaccaatattagaagcgacaataacttcatatccatctaaggtttttactaatttattggtatattgttttaattcattttgaaagttggattccaactctttttcttgttttcattgagttatgtctttacttgaaaagtcaaaacccacaataccttttctaccattgataccaactgttttgccatcttcaactttactggtaatattttttaaaccaactatggcaggaatttccatagaacgagccataatggcagcatgacttgttttaccaccactctcagttaaaaaacccttgacatactttttattaagagttgctgtttgacttggtgttaaatcattagctactataatgacatcacttttaatcctgattaaatcattaagttttactccagttaaataacttaagagcctttggtgtaaatctaatatatcactggcacgttctttaaaatacttatcatccatttcactaaacattaaagctgtttgttgaaaaacattatcaacagcaataacaggatggatgtttttatttagttgttgttctaattgctcagtgatagtaggatcattaagaatttggatgtgtgcatcaaaaatcattcctgcttcttgattaatattcttaacagtaattgtcttaatctcttcaaggtctttttttgctttttgaaaagcactgcttaaaagcttttttgcttgggtgggtgtcattttgacatttgtgtattttttaacgtcaaattgaggtgtttgaataatgaaagcttttgcaacagcaatgccatctgaaacaccaatcccaattatttttttcataggttaattgttattttttaataaggattttgcagtcatctcttttggtttgctaaggttaagatattccaagatagtaggagcaatattagctaaaattccagtttgattaaagttaacatttttgtcagtacatacaaatggtacaggattaatagtgtgtttagtaactggattgttattattatcaatcatcacttctgcattcccatgatctgcagttaaaaacatagttatttgattagctttacaaaaatcaactattcgtttaatttgaacatcgagtgcttcaagagctttaatgcaagcttgatagttaccagtatgacctaccatatcaggattagcaaaatttaaaacagtaaaatcaaagttattaagcttttctagtagtgcatcagtaatagctttacatgacatttcgggagctaaatcatatgtagcaacttttaaagaaggaattaatgtctttgtttcattgctgagattaacttcaaaaccaccatcaaaaaagaaagtaacgtgagcatacttttcagtttctgcaatcctcaattgcttcaaattattattagcaattacttcaccaagactatttttaatggtttgaggtggaaaagcaaattcgctaggtacaattccctcataattcatcattgttacaaaaaataaattttcttttcgtttcaattcaggttgatagttgtaataattgctgttaaagatcaaatgggacatttgtcttgctctatcaggtctaaaattaaaggaaataactccatcattattgtttaatgcaaactgatcagaatttaaattggcattaattgcaggataaataaattcatcagtaatttggttctgatattgcgtttcaatataaccaattgggtcattgaatttattttttgaaactcctaataaagctttataagcaatcatttcacgatcccagcgttgatcacgatccattccatagtatcttcccccaatagttccaataacaacattaggatagttttttagaaatatcattaatttctcaagatcttgttttaagctacaaggtgctacatctctaccatcaccaaataaatgtaatactacctttgcatgttttgaaaacaattcaatgagtgctaatagatgttcattatgactatgcactcctccattggaaaataacccaattaaatggatttttgaatggtttttttctacatgttctatggtttttaaaaaagctttatttgcaaaaaaactacgatccttaatatgttgattaatcaaagaaagtccagtataaacaactcgacctgccccaatatttagatgacctacctcagagttacctatttgacccataggcaatccaactgcttccccagatgcatctaaaagtacacaaggatatgaattgattaattcatctagcattggggtatttgcattttgtactgcattaccataaatagcatttgagatcccataaccatcaaggattgctaataaaacttttttatgcatataccctagccatttctaaaaagtttttaatttctaaagatgctttaccaactaaaaatccatcaatttgttccattattgctagtttttggatattattatgatcaactgatccgccatatagaattgagatattgttagcaacattttcatcatataagtcattaatatattccctaatggttttaatggtttgatttgcaacttcaggagttgctgttttacctgtcccaattgctcacaaaggttcataagcaataactaaatttttaattaagcttttgtcaatcgtatctaagcaattagtaagatcagttttaagaaagctaatctcttgtcctaaagcctcaccaatacataaaactacttgcatggatgcttttagacaagcaaagagcttttgattaataactgcactggtttcgttatagtattttcttctttcagaatgaccaataatactgttgttaacaccaatgtcttgaagttgagtaaagcttacagttccagtatatgaaccactttcaataaagttagcgtcttgggcaaataaaaggagactatcactaattattttttttatttcagtgagatgaacataaacaggtgctatcccaattttggcattgtaattaagtttattttgttgaaattgttcaacaaaactaactgcgtcttttaaatttttatttgttttccaattgccaattaaataccttgtgcgcatatgaaagattttataagttttcaaaaaccattttcttttccaactaattgatcattaagttatgacttgttttcagttccatgttttgtttgcttattggtacgtctatcatagatatagccatcaagctttttaataaaagtaatggaaaacaaagcatcacgatcaaactttctcacatcttctaaaagcttagcagctttaataagcaaacaattagttacaagcacttgggttttttggcgtgaatatcctccttcagcttcaaacattgtgattgaaaatcactgttgattatcaagtagatagttacgaattttttctatgtgcttaccataaacttctacttttacaaattgatacttagggaaataaaaagaagtaaataatcccaacacaatgttcatcaatagagtaaaaacgaggtttggagataaaaagaaagcaactccaaatggctggtgtttatcatcaccaacataagattgcactgataaactaccagttaaataagtaccaattacatagccaataataaagctaactgtattaattagcatcaaaattccaccaatgtctttgtattttttttcagaatatcagaatgctaaaaagtcaagaccgcctgtagaagcgtcaataattaaaataactgaataaaaaactgcttgtaaaaacccccaaataagtccataaaaaagtaaagatacttgtttttcagcagatttttctcaaaatataagttgtactcccttttcattaattaaattttcaaatccaccatcttttgctgtagttaaatttgcaaacaaaaagaagttatctattccagggatgtatgaaaagaaaaaaccaaaaagatttgaaacagctacaaaataaagggttaatagggtaaattttttggagattttaaaccatccaaaaataaagaaaggaacattaaaaagaatttgtgttaaccaaaaaatagcattaaatatagttgctgaatcaacattaatattttgtgaagtaataaaaaaattaacaagacgagctaatccttggctaatggaagccataccaatgtcataaagtcctgaaaactgaacaaaaataacaccaagtaatcctcaaaaaaaagcaactattgtcaaaattacaagttgtaaataaagctttttaaggttgtatatagattgaaacttaagaaatgatccagaaagatgaatccttacaaaattacctgaaattttgatgtttttatctttcatagttaagaacaattattttaataattttggtaattaataatttcttatttactatcttattagtaatattaagcttagtgcaataatggcaacgaaaatagagctaataaaagaattgcgtaaatcaacacaagcaagtgttatggattgtaaacaagctttggaaaaaaataatgatgattttgagaaagctgttaagtgattaagagaaaatggcattgttaaatcaaccaaaaaattaaataaggttgcaagtgaaggaattattgttttaaaaagcaatttacacaaggcaattatggttgagataaactcacaaactgattttgtagccaaaaatcaagagttaaaagaattttcagatttaatgcttgaaaaaatatttgaaaaagtaaatccaaaaacagaattagttgaaattgaaaaaattcaaattaataatgatgaaaaagttagtgaaaaactagcattaattgcttctaaaactgatgagaaaatagtacttagaagagtagttgtatttgaaactaaaactaatcaaattttcacctatttacatgccaataaaagaattggggtaattattgagattcaaggaaaactcaacgaagatgatggtaagcatttagcaatgcatattgctgctaattcaccacaatttattgatcaaagtgatgttaatcaaacatgacttcaaaatgaaagaaatattatccgttcccaagcagaattagaggttaaagaaaatcctaaaaaagcaatttttttagaaaaaactattgaaggtagagttaacaaattactaattgatacctgcttaattaaccaaaaatacttaattgatgaaactaaaacaattggtcaatttttaaaagaaaaacaagctaaggttcttaaatttattaggtatgaagtgggagaggggattataaaggaaactgttgattttgttagtgaagtaaatgcacaaatcaaacaataaaatccgccaaagaataatcattaaacttagtggtgctgggctaaccaaagaaaattctcaacccttttctaatgatttttttgaaactattattaatcaattaaaagttttaaaagaaagctatcaagtaggaattgttattggtgggggtaacattatcagaggtaataattgccaagaatttaacattgctgaataccatggtcatcaacttggtattatagcaacagtagttaatggctattttttaaaagcaaagttagatgcacataatttgaaaagtgctttactaagtgcaattagttgtcctagtttagcagtgcaaattctttcacagcaaactattgataaagcttttgaagagaatgactttgtcattttttcaggtggcactggtaatccttatttttccactgacactgcattagctttaagagcagtgcaaacaaaagcagttgctattctgattggaaaaaatggtgttgatggtgtttatacagctgatcctaaaaaagataaaaatgcaacctttttaccaacactcaactatgaccatgccattaaaaatgatttgaaaattatggatattactgcttttactatgtgtaaggaaaataatctgaaaataattatttttaacattaatgctgagaatgcattattagatgcattaaacaaaaaaggtcgctttactataattgaaaataactaatgacaaaagcacattacattgatttttttaaacaagcagctgataaaaaaattcaatgattaaaagaagagttaacaaagattagaacaggtaggccaaatcctaaaatctttgataatcttttgattgaaagttatggacaaaaaatgcctttaatatctttagctcaagtgactattaatccgccaagagaaataatcataaaaccatttgatcctaagagtaatactaatgctatttacagtgaaattcagcgggcaaacattggtgttcaaccagttattgatggtgaaaaaattcgtgttaattttccccaaattactcaagaaactcgcttagaaaatattaagcacgttaaaaaaataatagagcaaatttatcaagaactgagggttgtaagaagagatgcattacaaatgattaaaaaagataatcacaatgaggatttagaaaactctttaaaagctgaaatagaaaaaattaacaaaaattattctaatcaattagaagagattcaaaaagacaaagaaaaagaattgctaacaatttaaatgaatgaaaaagcaaaacaattcatcaaaaagcgaacttcagtattcattgctttattagttgtattttgctttttcttttaattagcgcatttgctgatggttttaacttttgatcaccgtgatcagcagatttcaattcaagaacattaaaagtagaacaagcaagtggtgttactagtgttattagtactgagattaatgaaaactttaaagctgttcgtttcagctttagcataatcattattttaattgttggggtaattggttctctgatgatttgagagttgttcacaaacatactaaaaaataaaccaaaactaagcttaagtttaacgttgttaaatgctggaataattatttttgggatgattggtacttttgttgttgtttatttttacaaatgaaatgcaactgttaatggtatttgaacattaagttttactctttctgtggttttactttgaataatttacattgcttgcatgagtaaaacaagaattaagtttagcttacaactttcatatagcttaggagctattgcttgctttattgctagcataggtactatttacttttctgttatcaggggttgaactacaatctttttattgatgagtttagcagtcagtgttgatacatttccttttctttttggaaagcgctttggtaaaaatcctttaattaaaatttcaccatcaaaaacatgagaaggagctttttttggcatcattagcaccattgttgttgttgctttactttgtgttttatattcaattcctttctttgtagcaaagcctacttttaatcaaacaaatggaatagcgctcaatacaccccaaaattatgatagccataatcttattaccaatatttttttaattgcctttatctctggaggaagtagtttttatatctactggtgggtaagcactttagctttaatttttacaggatctgtttttgcaataggcggtgatcttttttttagttatattaaacgcttaattagtatcaaagatttttctaaggttttaggtaaacatgggggagttttagatcgatttgattcaagttcttttttaattagtttcttctttgtttatcatttaatagcaggaaccatttccaaccaaaggttgttgatggaacctaatacttatttcagtgcaatcactagtattcaaagctagtatttagaattaataaagtatgactccaaaactaaagctaaataacaacataaactgaaccaaaagaacaattgattctttgtttgatttaaaaaaaggtgaaatgcttgaaaaagagttaattacacctgagggaaaatatgaatattttaacggtggtgtaaaaaattcaggaagaactgacaagttcaatacttttaagaacactattagtgtaattgttggtggatcttgtggttatgtaaggctagctgataaaaatttcttttgtggtcaaagtaattgcacattaaatttgttagatccgcttgaacttgatcttaaatttgcttactatgctttgaaatcacaacaagaaagaatagaggctttagcttttgggaccacgattcaaaacattagaatttcagatttaaaagaattggaaattcctttcacatcaaataagaatgaacagcatgctattgcaaatactttaagtgtttttgatgagagactagaaaacttagcttctttaattgagattaacaggaaactaagagatgaatatgctcacaaactctttagcttagatgaagcttttctaagtcattgaaaactagaagcattacaaagccaaatgcatgaaattactttaggggaaatatttaatttcaaaagtggtaaatatctaaagagcgaggagagattagaagaagggaaatttccttattatggagcgggaattgataacactggttttgtagctgaacctaatactgaaaaagacacaatttctattatttctaatggttattcactaggtaacatcaggtatcatgaaattccttggtttaatggcacaggtagcattgcattagaacccatgaataatgaaatctatgtaccattcttttactgtgctttaaagtatttgcaaaaagatattaaagaaagaatgaaaagtgatgattcaccttttttatccttaaaactagcaggtgaaattaaagtgccttatgttaagtcatttcaactgcaaagaaaggcaggaaaaatcgtctttttgttagatcaaaaattagaccaatataaaaaagaactaagttctttaacagtgattcgtgacactttgttaaaaaaattattccccgatatgactgaaagaactaaatctattaaggattattaatcaaaaacttaattctttctttctaaaattactttaatatctcttttcttgcaaaattagataatcttttcacaccaattgaataacctgattcaaaatatccaccattattttgatagataaaattaacaaatacaaaaatttactttctttatttttaatttatcgataaacagttcttacagcgccaatattagtaacactttttttggtttagcatttacttaatttttagtttctttaacaaattgaattgttataaaaatgcgattattttcttggattttaactgcttaactttttttattttgatataaagttaactaatagaaaagtatttatcttctttagttttaagatcaaaatatatcaggttttatttttaaaaaaattaaaaaatcttattaaagcaatgtgtaataaaaaaacggtaaaagatcgattgactttcccttaaaagttcttgttctaattttcttcacttgttcatttgttgaaagtaataaattcaacttttcatgagaagtactcatgtcaattttgatatcaaaaggaaagttaattgaagcaggtatactactaaaagtactttcacttaccctcctattatctgttggaggagtataagtaaagataacatcaccatcaaaattagctttatcaccagtaaaatcactttcacttacaccacttgtactagctaaaaaggatttgattaatgaagtactagtattgtcactaccaactataccagtcatttttaagtgaatttgaactttaaaatctaagttattttttcaactgtattgaaaattaactaccttttgacttttaactcctaaaactaaggcgatttgaccacttatacctggataagtttcatcaaaatataaaccttttgcactgatgttaggagtaacatcttcctttgatttattaactccaaatgctttagcaaatctgctataatcaagtggtttttctaatagttgataatctaataaagttgtttttcaactggcaaatacagtattaattacctcttccttatcagaactataacccttttttaaaaaagtaacagcattattttttgaaagttctatattgtttctctgaaaataagcttgtgctttttctaaaccaggatcagttgatgaacaggctacagataaagtactaagtgaaattaatggtaataaaaagatctttctgagtttcattacaaaatggaataaagcacatatggtaaaagatcgatagtttgatcttggaagttttgatcagctaattgacctacaaaattactttgtaataacttttgcatcaattcatctttaccaataatttgtaaccttaaattggtattaaaattaatttttctcaatagagtatcaaaactagatttggaaaataaattactggaaggtggagtataagtaaaaattaaatcagctgaaatagaatttttatcttttatatcactatcacttaatcctatttgactcaaatatgattttgcttgagcactgtcaaaagttccagtagcttgtaaccttatttggactttgaaatcacgagaactgttatagtaaaaactaaaatctgtaactgtttgactactcaatttaattacattattaataatacttgcaacattttgcgtgtatctttcaactaaacgtaagcctttaacaccagtgctcggttcaacatcttccttactcttaccactgccaaatgcttttacaaatctacttgggtcttgtttttcaagaatcttttcgtcttgcaaactaaatcttcaagcatctaatagaacgtttgtagcactttttgaatccacttcaaaactatctcttagtgaagtaactaactctttcttgtcttgatttaattcactatttttactgaaactatttctaagttggtttaaactggaaaaatttgttccactgcttaagttagagcatgctgtaattaaagaacctaataccattaaagaagaaatgatgccagcttttgttcaaaattgttttttttaacattgtttaagttaacagattttcttatttgtaattttttgatcattaatagaggtaaacttcaacaacaatcatttagaagttttgtttctatttttatcaattaacaaatagaaggtttctatacttaaaaaaacaaaaataatcacttaattttgaattaataacttcttgttcttgcaagcctagattattgacatgaaacagttttactgcttgaaaagtttcattggaaatcgattctctacttaatctaattccaagattttgaatttgtgtttttataaaaaaatgaatattagcaattaagtttcaaactatttctgttttttgaaaaagtctaactaaaagatataaagaagtctgattaaacaaaaaatgcttaaatctttttccaaagtttctaaataaaactaatattatttttaaacaaaaaagaaacagtacaaaaaatgcaaatactgatgcttttaaactaaatttagatctaagaaaactaacactcattgcgttttaagcaaactaaaaacaacaattaagaatgatttttcaaaagttgcaactataattttaaaacttttattgatttcttttgtattaaaaacatttgcacaacttactctaaattaatatctttttactaataataagagatttttttaaaactaatggaattactaattaagttcataacttaatttgccatatttcccattaataagttcattaataaaaatttcacatgctaagttagtgtttagttcattagctttcttaattaagcctctcactttagcaaatttttccaaaaagttaataaagctatccgcttcaaatggtaaaagctgtttgtaatgtttcttaagataattaaaagcaaacattcccacttcttctatattaactacttctcttctaataacattagtcaaaactagtttatatccaatttgaatttcatcaattcttttcaaaaaaactcctggggtatcacttaataataattcagggctaatttgaatccaatttaatgatttagtaataccagcgcggttagctacttttaagtgatttttatttatcaaaaggttaattaaactagatttacctacattgggcatgccaataactgctaatctaaattgtttgattaataagccttttgcttttaattgttgtcttttatttgcaaataaagttgttaatgtctttagaactttttttttgagtttaaaaggttcttttaatgaaccaaataagatctttttatttggtttgtattgtgctaaatctgtctttaatgccagtattaattttggtttatttaaaaaataactaattatttctgaattatgagttaaagttggtgctctagcatctactatctcaatgatgccatcaatttgactagataacttttttaattgatcatggatctttttcatgtgacccgggaaccaattaattttggcggaggtatatgtgtccatctattcccctgattcttgtaatagataccaaacaatccttgtcaatttgtctaataatcttaattaaatggggaatttctacatacatggaaacagaaactatcatcttctttttgagtaaagaataaccaccaagcgtttcttgaatagataaactgtgattagcattatcacttaacaatgcttttctaacttcttcaagcttatcagtaaatactttaatttcagcaaaattataacgagggaaaagataactaactactgttcctgttaacaaaattgaaaaaaaagttgcaattaaattaggtgagaaaaataaactaacttcccaagcagaatcacgataattattgacatcttgcaacaataaactaccagcaacaaaagaaccaattagaatagcaataatcagaataaaactatttacataaaaaagaattgatcctactgatctatttttcttacgagcataatattgggttaagaagtccgctcccccagcagaaccacctagtatgtaaagtaatgaaactgatatgccattataaaaaccataaatagctgcataaataaatgtggaaataattacattaccttgggaagtatcacttcataaaaaagggacaaaaccggcactttgatttaaatctttcgctgcttttcaaaagttagtatctgttatagaagctaacattggtggtaaattatcagaacctggaataatactgattaaaaaaccaaatacgttagatgcaacaacaaaatgggttgaaagaatagtaaagtttttacctatttttttataagaaaaaataattaaagggatgttgataaagacatataaaagccagtaaaggatgttaaaaattaataatctttgagtttcatcaaaactttttaacaaaacaaacactaatctagcaaaaccttgagttaaagaactaattccaaagctatataaacctgttttttgaataaaaataagtaaaagaaaagcattaataattgatagtaagtaaactaatacatactttaatggttttttagcctcataaagattgctaaacatcaaaaaagagttagaaatccttacgcgtttagaaccagatgcgactgttatctttgattcttttttaaataagttgttaaaaaatttcatttgtaacaaacttttttaagactttttttctttaatttttgctgacttaccagatctttcacgcatataagagatgtatgctcttcttactttacccctgcgttttacttctatgtctatattagggttgtggatttgaaagtttttttcaataggaattccatcagtggtttttcttaccatgaaagtttcgctaatccctcttccccttcttcttaaaacagttccagtgaagttttgaactcgaactttttctttttcacgtaacttaatagcaacattaacttcatctcctgctccaaattcaggaacatattcctttaactgtttttgttctactgcatcaattaatgcttgtttatttatttttttcatttttattttctaagtattttttgtataaatcaggtctgtattttgcagtttttaagatttgctgttctttacgaaatgattcaatcttttggtgatctcctgaaagtaaaacttcaggaactttatcgccttttaaatcgtatggccttgtataaacaggaaaatctaatagattatcattgaatgattcacaaataagactctgatcattaataactcctttaattaatctaacagtagcatcaataacacttagtgctacaagttccccaccacttaaaacaaaatcacctaaagaaacaatttgatcaatatatttataaattctttgatcaaaaccttcatagtgaccagataacaaaattaagtgttcgtattttgtaagttttttagcacaattctgagaaaattgttcaccttctggggagagtaaaactacatgagaatttggggctttataaaaatttaaacaattaataataggttcagcttttaaaaccatgccacttcctccaccataagccatatcatccacagttttatgtttatcattgcaaaaatttcttcaatttactacttcaaattgaactaaatttgctttttgagcttgtaacataatagaactatttaagtaaggccaaatagtgttttcaaaaagtgttaaaacagtgattttcactactttttaggacttgtttctttcttatttttactttcaataaatttcttccacaaaccagattcactaaataaagaacggactgtatcagttggaattgcccctttattaagtcaatctaaggcaacagtttcatctaatttacacttattttcctttaaagctggatttagatgtccaattaaagcgatatactttccattacgctttactcgcgaatcaaccgctactattctataaagcggatagtgtactcttcccatccgcatcaatcttattttgaccaatgatttttttcttaataaagcggctaattataactttttaaagttctattttatctatgcttaagaataacttaatcagctattttttattcgtctagttaataaatttaatcatccaataaggcccgattttcattttgcatgtcatctgcaaactcattatttttttagataaataagttcttatctttatatctaacaaagtcttaattattttctgttgtttagcatattattttaaggcgttaaacttgttttcagaattaatgatgaaatagttgttttgctattcacaatagcaaaacttaaatttgaattatgtttttgtttattaatctgttcaatatgttcttctcaaattaacctatatttttatcggttaattcttttttaatttcatataagtagattaatgtagttccactattaacaaatttttgtttatttttaaggaattccaatagtttttgtcactttcatttgggaggagagatttaccatttttaattgaattaattacaaaattttttttaacaaataattagttgtttaataatcgaaattattaattagtttttttagcattcatactgtaattggatttttctaattatgagtacttttcaataaatttgaccaacttattttgtggtggattagcgaaatatttatccataaacagattagtgtgaatttgaccaaaagcaatattaattaaacctgctaaggcagcatttgcagttaacaatcaaataaaaacttcaatgttatttgtttgaagtgttattgcttgaaaaataaaaagtaaaggaataaatacaaacaatccgtgtgttaaagagacaattcaagaataaagcactctgttagtattttgaaaatattgttgactattagcgcctgtggctacaaagaaaacttgtgcttgcactattaatgaaaagtaatttgctaaatccaaattttgatctgaaacatcaaaaaaactagataagatctgttttccaaaagcaactgctgttaacaaatagattaaactaccgaacgatatacagataataactgtataaatgttaatttttttaatttcatcatattttttttgtccaaacttatatgatgaaactgttctaactccttgtaataaaccaaaaatagctgctgaagctaaattactaatagcaataggtccagttaaaagtgtcagataaaaaacatcatttttatcagtagttgcttttgtcaaattaaccaaaaaactctcataaaatgtagtaacaatagaaagtgatccatttctaaaaaaggatgccattcctattaatgaaactacaactagtagattaaagtcaattttgtttaatttaatagttttaaaagttaaataagtaagatttcttttgtttaaataaattagataaataatataagctaaaaaattaattaagtatcctagtattccagccacagctgatcctattactcctaaagaagaatatctaactaataaaaaaactattaatatgttaatcaaattagcaataggcggaacaattgcaataaaaagttgtcttccctctgattgtgctaaataaaaaaacaaccttgaaagcataggaatgatgttaagaccaatcaaaatataaacatattcagatgctacatcaatagcctttttgttaaaaaactgttggaagctattagcttgaaaattttgttcaaaacttgattgatcaagattataatgcaaccattcttttgcaaaagataaaaccaaaaattgggtaattagtccaaatacagttgttgatattaatccggtatttcaagcttcctgaattttattttgatcatttctaccaattgctttagaaaaaataactccagttcctagaggaataaaaatattaatggcgtttaacaaaacaatcaaaggttgactaatatttaaaacagttttaataaattgtttaatattaagtccagagcttaaaaaactatcacttttataaaaagcagaatttttaaattcatcaattaaactctgatcagtaaaaatagaatcaggattaagttcacttctaggaacaaacttaatcaccatgatttgatctataaatacataagcagcactaaaaagtgcaaagaaaaaagttggaacagtaaatctaagaatagttagaaaaagctgttttgattcaaaaacatttttaattaggagttgtttttcaaaacgatcccttttactgttcacttatttatttttaaaaagatggatgtaatccttgtatcctaatttttccatctcttcaaaaggaataaattttaaagctgcagaattaatacaatagcgcaatccacctaattcactcggtccatcattaaaaacatgtcccaagtggctatcactgtttttagcacgaacttcagttcttatcattccgtgagattcatcacggtagttagcaattaaatttttatcaatgggttttgaaaaagcaggtcaaccacaaccagatttaaatttatcagttgaaataaaaagtggttcaccagatgttatatcaacataaattcccttttcaaaattgcggttatattcattaatgtaaggtggctcagtgtgagcattttgcgttacatcaaactggagtttggttaaagtacgttttagctcagcttcactctttttttggtatttactcatttggaatgttgtttatttaaatatacatcaataaatggttttcctactttgatcttaggattaatctcaattataccctcatttttctgttttaaattaagttctttttcagaacataacatgccaactgaatcaaaaccagctattttagtttttttgataactgtaccgctaggtaacactccacctacttgtactaaaactgttttcataccaactctaacattattagctccacaaacaatatccaagctttttgtcaaaccagtgttaactttacacctttttagatgggtgtttgcaataggaataactgaaacaacttcacaaacaacaaaaggaactttatttgctaatgaaataagatcataacctaaaagctcacttattcttttcattatttttaatgaaggatagtttagaccttcattaaagcggtgtgataaaaaaacttcttaaaactttttttgatattaaaaaagttaaaaccagtaattctatttgcatcattaacaaaaaaacttcagtctttgtcattttgttggcgtaaagttgtttcacttctacttcctatgatgccaaacatacagttttttaatgtttctttacgataaaagatagaaacaaaatctttagatatatcaaacataaaagttagttattctgtttgtattaaaaaggcataactattgatacctgtgtgtgtacaaattacaggtgaaagcaagtgctcacttacatcaactgcattgttgagaagcgtaacaaattcttgctttatgagttgatttttatcagtttcaaacattgttgtcaacaaagccgctcttctgaaattaacttctttttttaatagctttttttctaaaaattgaactgctaacttatgagcactgctagcagattgtgctttgttaaaaaactgcaatttgcctgtttcaccaaggaaactaattaagagatgaaatttaaagcttttgataataaatgactttaaattagataatcttcctccagctactaacggttttgtatcagttacaaataaaattgcaccgcacttattacggaagttataaacaaattcatctaagcctgctcttgaatactggttgtttttaagtcaaaccttaatatcactaatcaatcaagctattaaaacttcaactattctgctatctaaaacatgaaacttgtcttcaaattccttttcaacaatctttcaatttaaataggaggttgagatctctttatcaatagggattcctatgataagatcataatcattaattatgctcttaactttgtcacgaacctcttcttcagaagtttgtgatgttgaaaacttaacacctttaggggcgttaatcatcttatcagttaaggttttaagatcaatgttaaaacctgatttgaatgtttcttggtgttcagcaattgtttcaataatataaagcggtaaaacatagagatgactatttttatcttcctttagattactgacagaatcaactaaaaaagcgatcctcactattctagaacttctgttacagtgcctgcccctacagttctaccaccttcacgaattgagaacttactacctttttcacaagcgataggagcaattaactcaacagtaatagaagcattatcaccaggtagaaccatttcagtattttcagctaaagcaatagaaccagttacatcagtggtacggaaatagaattgaggacggtaaccgtttaaaaaaccagtgtgtctaccaccttcttctttctttaaagcatagatctcagctttaaatttcttgtgcggtttaatagagcctggttttgctaaaacttgacctctttcaacttctttacgttcaacaccacgtaataataccccagcattgtcaccagccattgctgaatcaagttcctttttgaacatttcaattccagtaacaactgcttttctaattggttttaaaccaacaatttcaacttcttgacctactttgagttcacctctttcaactcttcctgtaacaactgtacctctaccagtaatggtcatcgtatcttcaattgctaataagaaaggtttatctacttcacgtgtaggagttggaatccattcatcaactgctttaatcaaatcatggatcttagcctcccactttggatcaccttccaatgcttttaaagctgagccataaataataggagtgttcttaccatcaaaaccataggaagttaacagatcacgtacttcttcagcaacaagttcttgtacctcttcatcactagcaatatcacacttgtttagaaaaactaccattttaggaacccctacttggcgggcaagtaagatgtgctcgcgggtttggggcatcacactatcagttgctgaaacaactagaatagctccatccatttgtgcagcacctgtgatcatatttttaatgtagtcagcatgtccaggacagtcaacatgggcatagtgacgtttgtcagaagaatattctacgtgtgcagagttaattgtgattccccttgctttttcttcaggggctttatcaatttcatcataacgcgttgcagctgattttccttcctttgctaaaactgtacagatagcagctgttaaagtggttttaccatggtcaatgtgaccaatggtaccaacattgacatgtggtttggaacggtcaaatttctctcttgccatttgtttaaattatgttgttaattttaaataagtttaagataagctggagataatgcttataatcttcaaggacttaaatttagtgaaaacaaacaattgccaaattattggctgatgaaaacaactttccttaccacaaaagacattcttaagtttcattcccttatttttggtcactagtgcttttgttttaactggaattgttgaaagtcttttaacatttggaactattattgaacaaattgataaattcactgatcagactaatgtgatgttattaatttatgcagttatctacacttttaatccaaaaagttgattgttaaaaaaccaacaattctttttaagtgcattagcttatatattatttacttttattggctataacctaattttgtcaatagctggtatagcttataaatcaacaaatccatataagttaacaagtagtatttttctccatgtaattgcaccaatagcattcttcatagcaagttttatcaaaataaaacatgagaaagatgtcaatattaacatgttctttaaaagcctattattattcatgatctatcctttaatatatgggctttatttagtaactattccatatgtaaggcattatctttttaatggtaggccatctacttataccatttatggcagcattacaaatactaaaaataatccttttgcttgattagttgtatttgcagttttatttatctatttccccttgagttacttagctatatatctattacaacttaagttaataaaaaaagccatacaaccgcaatttaatttgccttttacattaaataaatgaaaacaaaaataagaaaagcagttattcctgctgctgggttgggtgttaggttactaccagcaacaaaagcaattcccaaagagatgttaccattggtaaataaacctactatccaatacatagtagaggaagcagttaaaagtggcattgaacagattcttgtcattgtttcatccaaaaaaacagctatattagatcattttgattatgatctgatcttagaaaatgccttaattcaaaaaaataaattgcaggagcataaagagattgaagatattgctaatttagcacatatcttttttgttagacaaaaaaatcaagatggtttgggagatgcaatcttgtttgctgaatcttttgttggtaatgaagactttgcagtattgttaggtgatgatgttgtttttagtaaagaacctgctttaaaacaatgcttggaagcttattatgaaactaattgtcaaacaatcggtgtacaagaagtagatccttgtcatgttgataagtatggaattatcacccctgaaggtgattacaaaaataaagatcttattaaggttttagcaatgactgaaaaacctaaaccaaaagatgctaaaagtaatttagcaatcttagggcgatatgtactcaaaccatctattttcaaagcacttagaagtgtaccttatggagttggtggtgagttgcaactaactgatggtttaaatttttgtttgaaaaatgaaaacttttatgcaagaaagtttactggtactaggtttgatgttggcacaaagagtggttttattaaagcaaatttatttactgctttaaacaataaagatattagtaaaaaagaagttttagaacttttaaatttagttaaagcttaataccatttaaagttaaaccaaggaagttttcatttctaatcaatcgactaaaaggacacatttcatgggctttttgaattagttttttaccaacttcttggtcattactattagtagttaattcaacaccagccttaatgtgaaatagtccattttcttgatggagttctactttaacacttacaactggtttttttgaaaaactaaattgatgttgttgcataacaacaattactgcttgagaaaaacaacttgcataagcagatgcaaataactgctcaggattattttctgtttgaactgataaatcaggtttgggaaaactaagttttgtttgaaaaccatctaaagttttaacactaccttctctgccagtttcagtttgtgcaacagttttataaatcaatgccatgttaattaatatagataatattttagtaaaaatgttaaataacatattgcaatttctcaaagaaagagaactttattcacaagctaattttgaaacagaactagataaccatttaaaagagaaaaaaaataacttttatgttggttttgatccaactgctaattctttacatattggcaattatgttttaattcacattgcaaaattattaaaagacatggggcatactccgcacatagttctagggagtgcaactgctttaattggtgatcctactggcagaattgaattaaggaaaattttagaagaaaaagaaattgtaaaaaacaccaaaacaattaaaaaacaaatcaaacagtttttaggtgatgtaattattcatgaaaacaaagtttgattagaaaaacttaattacattgaagttatccgtgaattaggtgcttttttttcagttaacaagatgttaagcacagacgcatttagtgctaggtgagaaaaaggactaactctaatggaattaaactatatgatcttacaagcatatgacttttattatctacataaaaaccataatgtcactttacaaataggtggaagtgatcagtgggctaatattttggctggtgctaacttaattaaaagaaaaaataatgctagtgtttttggattaactgctaatttattagttaaagctaacggagaaaaaatgggtaaaactagtagcggagcattatgacttgatgaaaataaaactagtgtttttgatttttatcaatactggattaaccttgatgatcaaagcttaaaaaagacttttttaatgctaacaatgcttgataaaaaagtaatagatgaattgtgtaatttaaaaggcccaaaaattaaacaaaccaagcaaatgctagcctttttaattactgaattaatccatggcactaaaaaagcaaaagaagcacaacaacgatctgaactaatatttagtaatcaaccagatcttgatattaagttagtaaaaacaagcactaatctaattgattatttagttgaaactaaatttattaaaagtaaatcagaagcaagaagattaattagtcaaaaaggtttgacaattaacaataaacacgttttagacttaaaccaaataattgaatgaaaagaagagttacaaattattagaaaaggtaaaaaaagttttttaacaattaaaactgttaattcttagctaatttatctttaacttctttttctatttcagtttcaacacttttttgactagagcttttactttctggttttttgattaatttgttatgaagtaaatcaacaactttctgcattgaatttaatgttttgaaatcatagcttgcttggagtttaatgtttgtaactagatcatcaaatgcttcattcacttttagtttagtatccataaaggttgtaggcacactcataaacaagtaagtatgaactgtgtcattatagacattaaatttggcatatacattcaaaggattaaaaagcactttatttaatacctctgtatctaaattctgaaaagaaaaatttgaatctttttcaacaaaaagtgagatgttttcttgctttttgttttcagtaagtgcttcaaactgagccacattcttatttaaagaatagttagcatcagttaaaaagaaatgattttcactattaattgctggtgtaatagcaatcaagcaagctactttttctgttttattactgcttcttttaattgcataaatatgaccaaaaacaaattcactaccatctttataagtaactttaaattgtcttggaagtggttcaaaattgtaaagagcagttggataaaaacttggtaatatatcgctgcttataggaccttgttcaaaaaattcaaatgattctattgccttgaaattacccatctctttttgtcataaattagttctgttttctttgttaactttttttaatagcttgtttcttttaaaaagagcagcaaaatggataacaaatgctaaaaacaaaacaacactacctaaaacaattaaaaaaagtgatgctatatttggtatttcattacgtgtataactataaataccaaatgagatagcaataacactaaaaagaccacaaagtccaattactcttagaaaagcattgagtttatttggtgtcaaaaagaacttgttaaatttagttagatctgacatatttgtataaaagattgtatgaaaatataaaccaaagcaagctcaacagttgttttattacaagatctttttcctaaaaactgcaagttgccaaacttagcacgcatctttattaaacgaagatagagctcatcaaattttatatcaagtattttgtatcttttgtttgttttggaaataaaagtgcaaaagtactttagaaaataaaaaatcagatcccaaattcgtttttgtcctaaactaatagttttgttttttagtaatacttcagtttgctttaaaacatttttaaaagtaataacaagatcatcattactgtcatttaaataagtttgtatgttttcaattcaaatcaaaatgtagtgatattcactgtcaaacaattggggattatttttaattactgtaaaaaaatcagtaattgttttactttgatcatttagtactttaaaacaattccaagcttcattaccataaccaacttctattgcatttaattcttgcttaaatgatagtaagttaaccaagaagttatcaataaaatcaacaacactaactgtttgtttcactttctggttttacttcagatttatttagtttttgctttgcttgttgttcttgcttttgcaataagatttctggtggtagtttagtgtttttatggatgaagtcaatatcacttttcaaaatagtttcagcaattaaaagtgcttctacaagcaattctagttccttacggttactcttaatgattgtttttgctttcttatactgttcttcaataatgaaattaatctcattgtcaatatctttagcagtttgttctgaataaagttttacattagaagggagtgtcccttgacttggtacatattgcacttgacctaatttagacatcccaagctgggttaccattgctcttgcaatattagttgctttataaaaatcgctagaagcgccagtagtaatttctaaattaccatagatttcctcttcagcagctctaccgcccatagcagttgctatcattgcaagtaaatcagattttctttttaggttaagatcaccactcttaggtgttgaaagtgtgtaaccccctgcttgaccacgaggaataatggtaatcttttgtacttcatcattactgtggacatgtaaaccaaccaaggcatgaccagcctcatgataagcaactagttttctatcttcatcactaattacacgtgactttttagcaggaccagctattactctatcaattgcttcatcaatgtcattaatgttaattgtggtacggttgtctctaactgctaacaatgtagcttcattgataacattttctaattgagcacctgaaaacccaggagttctcttagcaacatctaaaagacttatcttagaagagagatttttattttcagcatgaacttttaaaatcccttccctttctttaatatcagggagattgatttgaatatgtctatcaaatcttccaggtcttaataatgcatcatctaatacatctaacctatttgtagctgccattacaacaacacctgttctgcttgtaaatccatccatttcagctaacaattggtttaaggtttgctcaacaacagaataagaagagagttcaactctaccccgtttagaaccaactgaatcaatttcatcaataaaaataatacaaggagcagcctttttagctttattgaaaagatctctaactcgtttagcaccaacaccaacaagcatatcttcaaatccagaacccgttgattgaaagaaaggaacaccagcttcaccagctactgctttagctaataatgttttacctgtcccaggtggaccgtataaaattaccccacgtggggatcttgctcccatctgggcatatttcaatggattttttaaataatcaactatctcaagcaactcatgcttttcctcttgaagtccagcaatattggtaaatttcacagttgacttagccaacttagcttgggttttgccaatagaaaaaatattatcttcttctctgccccctgcagatatacccctagcacttcttcaaaagagtaaaaagaaaactacaaagataataattggtagcaagccaaacaaaccatttaatacatctctagctctagtatcaggagcaatgaaagtaccaagggtttcaaaacctgcaatactctttgtgttattactagaaccaccattcatcatggttccattactattaacggtaatctgaccattactttggttaattgataagttagcaatattaaagataacattgccattactattaacagttttgtgagcagtaacagttaatggactatttaaaccatcaaaggtaatggaaacttggagaatggtatcagtaacataagttgaaccatttatttgtttaaatgtcagttcattactaaaaccgcttacttttgctgttaaagtgctgttactacctccatttaattttcagctttcaactactgcagtagcagctcttggactgaaaatataagctaaaacaccaataacaacagctaaaatgatgactcatcaaaagacttttcaagcagttttacgtgaaaaattatttttttcagtagttgtttgttctactaaacccttatttctttttttcatctatgttagtttttgaccgatttgggtttttttggtttgaactacattaactgtaattatactgccaatggtaatgaaactaataagtgttaataaagtgacgaaaattatctttttatgtttacttaaaagtgcaataaaagccttgaaccaacgcataaaattttaatatctgttttagggattgtctggttcaaacacaccaacataaggtaggttacgataaaaaccatcatagtcaagaccaaagccaaccaaaaaattatcttttactttaaaacaagaaaaatcaatattaatatcaaaggctttgggtttaatcttttcaattaagctaattaaagttattgatttagcatgccttgtttttagaagatcaataactaatttaatagatctaccactatcaacaatatcttctattaaaaggatgtctttatctttagggtcatgggacatatcaagcacaatcttaggtggttgtttttgtacatgtgaaccatgataagaagcaactgccataaaatctagttggaggtcaaaactaaatttacttatcactttgccaaggaaagggatgcaaccttttagaatgccaagaacaattacctttttattattaaatttagcattgcaccaattaactgctttttgacagccttcttctatctgttgttcattaataacaatagatttaatacccatcttatttagttttttgacgttctactaaaacaacagctaagcaattaatttcattactgtctaaaggttttctaactttgagattaattgttaattctgaaattcttaaagcactacaaataaaagcaaagatagcgtgtttataatcatcaaccttttgctcttgaggaatctctaaggagatatcaatattattgataattcagttttttctgatgaaattgtaagttcttgctaagactcttggtgcttctttttttgcagtacctttaaattggactgttgattttcctttattgaaaacaatatgaccatcacctaatgcagttgcaccaaataaagcatcagcaactgctaattggataacatcactaacttcatcactgttttcaagatcataaatatatttagaattctcaaaatcaacaccgcctaaccaaaatttatttttactttctttccttaattttatgtggtattttttgcttcctaggccaactcttaactgcattgttacaaataattataatatcgctcatctttaaataacagtgttgttttgtaatccaaaaaaagtaaattcaggcaacagttttttgacttcaaatatccttatttagacaaagcaaaatttattaaagtgaaccaaaataaaattgaagtatatctctagataaataaatatgaaaggacctaaaattgcaatagtaggatcaggtgctgttggtactagttttctatatgctgcaatgactcgtgcacttggtagtgaatacatgattatagatatcaatgaaaaagctaaagttggtaatgtatttgatcttcaagatgcttcctcatcatgcccaaattttggcaaagtagttgctggagaatacagtcaattaaaagattatgattttattttcattagtgcaggaagacctcaaaaacaaggtggggaaactaggttgcagctacttgaaggcaatgtagaaattatgaaaagcattgccaaagaaatcaaaaaatctggttttaatggagttacattaatcgcttcaaacccagttgatatcatgtcatatacatatcttaaagttactggatttgaacctaataaagtaattggctctggtactttacttgatagtgcaagattaagatatgcaattgcaactaagtaccaaatgagttcaaaggatgtacaagcatatgttattggtgaacatggtgatagttcagtaagtattatttcatcagctaaaattgcaggactatcactaaaacatttttctaaagctagtgatattgaaaaagaatttggtgaaattgaccaatttatcagacgcagagcttatgaaattattgaacgcaaaggtgctactttctatggaattggtgaagctagtgctgatgtagctgaacaaattttgaaagatactaaagaagttagagtagtggctcctttacttactggtcagtatggagcgaaggatatgatgtttggaactccttgtgtactttcaagaaaaggtattgaaaagatcttggaaatagaactttcaaatactgaaaaagttgcgcttgaaaattcaattaaagttttgaaagacaacattaaactagcaaagctttagttttgatagaaaacattagctcatctataaaaagagttttcaaaaaataactcgttacttctcttaacaagcatactaatttcactgagatttttaatcttgttttgagaagtttttatttttaattcatttttgtgcttatttcatccttcataaaaacccttaaattggttattgaatttagtaatgaaataactaggagtttgatattcttttacttttaattcaaaatcaagatcacgtttttcacaactttcataaaactttacttgaaatttcagagtgttaagataactatctagtaaggtttttaatattgcatctttagttgtttcaaatgtattaactaaaaatgagtgaaaaacataatcatctaacttcacaaaacaagttaataaactttttttaaacaactggttttttaaaagcggtttaattacactttcaacattcttaaagttatgaaaattaaagttgtcttcttcaattaaagctttaatccgttgaaaaacaaatcataagttaagttctgtagcaatacttctaccatcactgtagattgattgatacatgtggtgtcttgttatcaagaagttttcaatgaaaggcaagcatttttcttgaaaaacaattttataagtgccctgattatctacacattccattccattgataattgattgataatcaactaatgagtgactggtacctgtaaaataagcatcacgtaataaataatccattctgtctgtgtcaagatctgaagagattagctgtctcatccaccagttaataggttgaatattttgattttcatcaattaaagcgccaatcagatttggatctatcttattagcttttaagatagagacaataggttcactattaactaacattgaagtaaccttttcatgaataaaaagttgttttttaaaatcaggatttttagcaaaatagatttcaaaagcatgagaatgaggtccatgaccaagatcatgcaacaaaccagctactaaaacagtttgttttttaatttgatcaatatttaaaaatgcagaactatttaagatccttcttatcagttcataaactcctaaagaatgggcgtacctagtgtgaactccactaggataaaaatggaagttaattcctaattgtttgatgtttcttaacctttgaaaagcttttgtattgaccaattcatacatccactttgtgttttcatcaaaaataatttctcctaaaataggatctttaaaaaaggtttgttgcattaataaattgcttaattaagtttattgcactttctttatcaaaaatttcaataatatgtgctaaatcaggtccatgctccttatttgtaaaaattaaccttattggcataaaaagttgtttaccttttaagttaaacactgctcctactttgttaatagttgttttaatttgctcagcttttcattcttccaacccttgtaaagatttggcaagctgttctaaaaaaagtttgatgtttttaaacaaaatatgacttttcttagctaagttttcaacacctattttagtggcaaaagattctcttatcaattcgtttatttgaacaccatgggttatttgatttttaaaaagtaaacttatttccctgtttttatcttttaaataatcaaccttaacatccaagtaattatcaatgaaattgaaataagcattatcagttaattgtttaatgtaattagcattgattcattgcagctttttaatatcaaaaaaagcaggagcactaacaactctacttaaactaaagttttcaattaactgtttcaaattaaaaaactcctggttgtactgtggatgtcaacctaagagtgctaagaaatttaataatgcttcaggtagatagccttgttgtttaaactgctcaataaactgagtagttttctcatcacgtttagaaagttttttgccactttcatcaacaataactgaaagatgaccaaagcggggaattcttttaaaacctaatgcttgatatatagcaagttggtatgcagtgttagagatgtgctcagctccccttaaaacatcagtaatttccatatcataatcatcaataacaactgcaaagttataagtagcaacaccattagctttaagaataactatatctgttaacgcactgccgggaatagtaatttgtcccctaaccagatcatttcaactatattcagcttcattgtttatttttaagcggatagtaaaaggatcatttttttctaagtgattagtaattttcttggaatgtaaattacgacaatgacctaagtatttaggggttttgtggttattaatggcttgttttctatctgactctaatttttctttgctacagaagcaacgatatgccagatttttttcaattaaatcaaatgctagttttttataaactgctagtttttgtgattgcagatatggaccataattgccagggttataaaccgattcatctgcaatgactccaagccaacgcaagttatcaaattgtgaattaattccttcttttatgtttctttcagtatcagtatcttctatcctgataataaactcaccattaaagtgcttggctagtaaaaagttaaagattgctgttcttgtaccaccaacatgcagatatcctgttggggatggtgcataacgtgttctaattttttccattacaaatgttttggtaaagattaaagagttgacaaggactcaactcttgcgctctaatgctagtctttaaattttgcttttgaataatgttaagtaaataatcaactgcaaaaaaatgctttaagttattaattaacatcttccttctttgattgaaacattgctttaaaaacagaccaaacttaaagtcataactaaccgatttatttttttctaataatattaaggttgaatccaccttaggtttaggtttaaaagcatgcctatcaattttaaaaactgttgtaatagtcaaatagtattgacaaaaagcaccaaaggcactataatcactagaattaacctttgccagaagccgattagcaaactctttttgtgtcattaaaacaaagcttcgaagctttgattctaaaaacttattgattattggagatgtaatgctatatgggatattaccacacaataatggacttaaattttcaaaaaaactattaaagtcctttttgagaatatcgcctttaactagttggtcttcagttaatatcttttcaactagaagatattcaattaagcgtttatcaatttctatccccttgtaaggtattttgagttttaacaaataatttgttaacgctcctttaccaacacctatttcaacaattgcttgtggatttaaatttttaacaaaagcaaaaattcttttaatgacgcttaaattaaccgtaaaattttgacctaatttacgtgaaggaaaaaaactattcacgctctaaaatcaaatctaatttggaataattttgctttcttttttcccttcttttgacaatgaaaacatgggttaaataagattgtaataaagtaaacaaagcatttaaaaaccaataaacaccaactccagcagcactaaatgcagtaatagcagcaaacacaaagtaaaaaattaattgcatctttttagttttgttgagttgttcaatacttttttgagaatgggctttcgcattctcattacgcttacttgcccacacttgaggaagtttttgagagagaaattggactggtaaaacaatcactaaaaagatgatgaaaggtcaaccagttgtagtgaaattagagaaaatttctgttaaaggtacttttgaaagatcccaaaagttaaataagatgattgctttaattggtcttaaagtagtaacaatcctataaataattaaaaagataggtaaagttacaaaaacttgaacaaaagcagcagatgatttaatgttgtgttttttataaagtgacattatctctaactgtctgtttcttttactttgtaaatctattgcccctttatatttagcgttaatttctgctaatttaccttgcacttcattcatcttttcaagtgctaaagtagagtttaaggtaatcacaatagttatcaagcgaactaatagtaaaagtactattaatgaaagaatcatgttaaacccaagttccaccccgctacctagtggaactctggttgcatacataattggtaaaactatttgcgctgcaggccagacaaatcatccataaaaagggccatatgctaaggtgtaatcactaaaggtgaaataagggccaaagttatttgaaatcaaatcatacctataatcaccagtagtaccaaatttataacctatctcaagtcctgaacctaagacttgattagtacctgttcagggttgtgctaaggtttgagtacagccccaaagcccaacaatagttaaaaaaataaagataaaaaccttaataacctttatgaaaatagctgaaaactttttgaagttttttcagttgtttttttcattaacaactgctgctgatcaaaaaggattaaaggtggtttttatctctttatttgtttgcgctagtttgataggcatctacttcttttatccgctttaatagttgcaaaaaaagtttttgtttttctttaaatgttaattcaataaagcctttgttgacaataactaaaatatctcaaggttctaaattattactaatttgttgaaagatactacggatctgacgcttaattaggttacgttgtactgctagcttatatttagtttttgcaattgatattgcaacccttcaagtagaatgattattcttaataaaataagcgttaataaaggtaccaaagaacctggttttactttgaagaatggttgtaaaaaccttgcgttctcttaagctgtgactctttttaacgctcactggaaaccgtgagttgagcacgatttttaaaacgtctttgccttaaaactttacgtccttgtgcagttgccatcctagccataaaaccatgggttttagcacgctttaatttgcttggttggtatgttcgtttcatgaaacaattaatcaggtgattataactaaactaagggtctgactaattggttagatactattttaccatctgaaattttaatgattctattagctatccttgttaggcttacatcatgggtaaccattaggatggtttgcttatatgttttgttaattgtttgtaataaattaatgatattttccgcagaattactatcaagtgcaccagtaggttcatcacaaagtaatagtttaggttctttaataatagcacgggcgatggccactctttgtttttgcccacctgacatctcataaggaaatttatacaagatttctttaatatctaatttttcagccaactcttctatatcaagtcgtctttgatatttgggaattaagttttgtgaaatggcaatattatcataagcacttaacaattcaatcagattataacgctgatagacataaccaaggttattctttcgataagttaaaagttgttcactagtacatttttctaatggacagtttgctacgatacaactccctaacgagatagaatcataaccacctatcaggtttaaaagggttgttttacctgatcctgaagaacctaaaatgattactatttcaccataagctatctgtaaagaaacatctgaaaggatagaaatctcttgctttgaatcatcattatgaacattttttcacatcttattgatggtaataacaattcccttagcttgttgagcaaaaggagggatatataaggtattggctttttgctttttattagctttctttttgagctttagctcagcttttttaatgttatttaaaacttttttattcttcttaggaggtttagatttactctttttgaaataatcatcgaaattggcactaaaagaaggacttttaacgttatctaagatatcaatacattcatttcaaacagttttattgccttttttcattaactaaaacccttccttcagttcagctgagcgtaacttaattcaaaagtaagaaccaattacaaagatagtaacaccaaataatactatccctaccatgtatggcaagaactcaaatacattagttaaaaagacttgtgcaacattgaaaacaaccgcttggataccaattaaaacaccagctaaaactccaatagaaattagtaatgctaaaacaaatgcagggataaagaaggtaagtaaactaattaaattttgtacatctctatagccaatagccttaagtgaaataaagattcttttcatctcttctaacattgagataccaagtacaacacaagtaatgaaaatgaaaggaataatagttcctaaaagaaacgcatctacttgattcacagtgttaaacaaaacttcagcattatttctaatgatctgagcactagttccagctgcatcaatattgagtacaggagcaataatgttattaccaaaaatactacttgcattttgggaaagtaaattaacactatttcattctgttttgtatttattaactagttctttacgaagcgattcataattcattgaagtagtattaataatctgtttttcttgtgctaacttattaataatttcaggatcagtaggtagtatggatgtaataactttatcaagtttattccttactaaattttggaaattattaccaaagtcagtgaaattaccccaaacaccaattatcgagtttaatactaatgccttatttaataaagaaggttttaattctttggaaaatacaccattaaaaggaacataaccgtttggttttacataatcaatttcatattcatcactactttgagattggccatttgtctttttaataacatctctaataatacctctgccctgattaccacttagttttaataagttattagcaatgtgttggttaatataaagttcttgtccaaaagcatcagtagaaacaccaacaactttaaatgctactgttgaattatttaagggtgcttttagaaatttttcagagtatcttgtggcagtatttttcggttttatataaacataatcaccaatattaatgttgttagcatattgaaaaccagcattaacaattacattcatttcctgatcagaactaattaaatttcttaaagagttaccactaccatctatcagattaacaaaacttgattcagggttaatccctgttaaagtgtatggtgaattctcatcaagattatcttcttgaaaaccaaatgggccttcaacataagtgtaggtttcttctatggcagggtcaacaggaacaatcccaaaatttaacttagaatcttgttttgcaagttcaaaatccccataaactttcaacataaaactaagaaagctatcattaaatttaaccccaccaggattaaatacatcaattgtagttagtaccctactagcatctaactgaatttgattagttctagggtttctaattaaaaacccattagcatttaagttattgaaaaagtcatcagttaatactgaaattaaaaactgatcactagatgctgaaagtaactgagtaatctgtttaggaattgatttttcaacaatttcccaagggttaatgttagaaccgccaaccctaataggaaagtcaataatccattttgatagagaggcatgcctaaagaaattctcatcagtgtttaactgttgagcaccaccataactaggcaaaagtaagttgcccaattcaagctcagttccatctgctgcttttattggttgatcctggcggtttttaagttttaaattacttggtttataagggtgctcattttgagaatttgcttgaacactttcgttatacaaggttttaataccattattattatcagtaactccaaagtgtgaatagggttgaattgcataccatccagattgctctgttggtgtttgtaaattcaacttatagttaaagtttctatttaaggaagtgcttgtttgtgctgcactaaatttttggggaatagtacctgcaatcccaattaataaaagtgcaactgaactcaatcctacataggtaaataaacgtgaaaaacgtgaaacgattaatgaaaccctaaacttggtcaagggtgacattgtatgacttttatgttttaaaagatgaagaagaactgaaaacttggtctcattgccttgatcaattaagacattaacaggtttactaaacaactgtttaaaggcaattcaactaataaattcaaaaacaaaaaaggttataaagaaagaaccaaaaaacgataaccagttaaagctattttcaggtaaagcaataaaccaatacctatttatgattccctttacttgtccttctagaagaaaggcaaataaaactcctaaaaaactagaaacaattgcaacaataccagcaaacacactcattccaacaataaatttagttgttgaaaatccccctgctctgataatagaaaactcagtttgattctttttaataaatgacttaattaaaagaataattaaataaagagcaagaataatcaaaaatatagcaataacagtacttactattgccaaatagctttgcactaaatcaggaaaatagtttcttgctgttgtcagataattaaacttagaaatatctttaacattaaatgctaaatcacttctaggaacatctagatatccctctaatctattagcaataaactgcactgggtcttggtcagtgtgctgttttaaatctgttgacttaaaagcataataattttcttggttagctgctggtacagcaaacagaatacttctgtaagcttgatcattaacaaagattaacgcttcatcttgggtattaggcaacggagattgtaaagataacactgggtaaccagtttctactgattcacctatacctaaaattgcaaatgttagtccgttaatactaaatttataacgatcaggtagatcatttaaccagttagggaaattgtttggtgtttgcaatgcagtttttcaagcatattccccttcctggggaagaatttctttattgtgtctaaacaaccattgttgagaaacaaccgctccgtgtgcttcaggggtttgcacaactaaattttgttgatcagtaggtaatattaatggattgaccccatttttaacagtaatagggatctcaagcatttggcgatttgtctctattaattcattaggatcttgaaaagcaggagtaaaataacttaaaagtgcaagataattattagctgcttttcgtttatcttcttccttaagattattaaatccattggcatctaaattagttcattgttttaaagcatctaaagcagtagttgggatattagtagcttctggtaattgggcttgagcaataatatttgctaactttggataaatgggaaatttagtagattttggacttaaagcttgggtattttttaaactagcagtcattccaccactactggtgcttggtttaaattcataatcaattttttgtaaaaatccattattagcatcttgaccaccataaattgtgtctaaagggtttgattcattttgctcaggtttaaataaccaagatttaagatcaacgccatcaattaaagaaagatcgttgtatctctgttcatctttgttggaaactaaaaaacttgctgactctgctgaactaacattgttagctattgcgatattttgctttgaataatcaatgttattgaaagcagtggcttttaaaaaatgatcacggtacttttctaaaagatcaactgtttttttaacaagatcctcttgaaagatactacgtcattgatcaagtactgctgcataaactgcatcaagggttttttcaggagtgttattggactggtgaattttattgtatgcagtttgaacatttgaaaagttaggatcagctattccattacttgcttgactgttttgattttgaactaattggagattgttgcttgaaggttgaaaagaaagattattatttcttaccatcattccattctgagttttaaagattgtgtctttatcactatcactaaaacctggtaaggaattgagaattgtatctttctcagattcaactttctttttaagtcaatctttattaatttttagttcaaatttcttaagttgcttaagtttattttcaagatctcaatctccaaaagaggaattattggctatagttttagcattagtttctaaccactttaactgttcattatctagcttatttaatttagaaatatctaaattaaaagttaatgtaaaactttgattatctttactttctttttgggtttgaaattcttcaacaatttctttaaaaggattgacatctttccaaaattgagaaccaggatcgatttctaaatcaattgggatgtttgcataaagattgggaaatcagttagcagcttcattaccacctgtaaatagatagttagcagatatatcagtattatctgctttggtctcatcactcttaaaccaaactttatctttgttattggttttataaagtgaattaacagtactgtctttttgtggatcattgtttgtttgttgcttttgtgtaatttttacttgtgttcctgtgctttttcctttatcaccaggaaaacgcgcaatgccagcacgcaatgagatagtttctttaattaaaccatcagcaaaataacctagaaggttaccactagcatcataaataaggttttgagggtctgatattatgtgtctatttgtaatggaatcactaatatcactaccattaaaagaatcagtattattaaaagaaactgctaaccctttataaattcttttttcagcaatattggcttctccatatgcttttaaaatacctctttttcttgctaaaaagagtttatctttttcattaacatcgcctttgcggggaatggttttgttttggttatcaccactaccattactttgtcctgaatcacttccaaaatcattttcttgataaggaaaaagatagttaatttttttatcatctatctttattttggaaaaataaccactatcattagttaaactggctatataaacaggattagcttcctttaaaatagcaggagctactatatcagaagagttagttttagatactaatgtagtgtaggtactaactaagttgttacttaactgaacaatagatgtttcaaggaaaataatgctaaataaaacaaagataattccaaataataaaaagaagaactttttaagcgatttaaatatctgtttaaaaaaagaaaacatctcaattaaactcagttaatttgttcgatggtttttggattctgatttaaataatcaacgattatcttgccatcatggattttaattacccgtttagctaattccactatcttttcgttgtgggtaactattactatagtagtacctttgtcacgattatattccacaaaaaattgcaatatttttttggaaatatcaatattaactgctccagtaggttcatcaccaaacaaaattttaggttctttaattaaagcccgagcaatagcaacacgttgttgttgtccaccagagagtttatgaactttcttatgtctatgttcttttaattccaagcgttctaataattcttcaagattattattaaaccttttttttaatggtagagcaagcttaatattatcatcaacgtcaagatcacgcaataaaccatattgttgaaaaatataaccaacgtttttatttcttaacgcggttagttttgcatcactacaacatatggtgttagttccacaaacaaaactatcgccgctagttggtcgatctaatgcggaaattaaagaaagtaagctggttttaccactaccagatttaccaagaataacaacaaattctcctggaagaatttttaaattaatgtggttacaaataagttggtgttaatgccatttgtaacagctttacaaacttctttgaagtaaatatcatactttttagcttcaaatgaattaagtgattttcttttggggtgctttttatttaactttttaattaatttagatgcttttttactaacagcaaaatctgatgattttaagtaaatatcaaactttttgttctcttttgtttttaaaaccataaacaatcattaagtcatctaaaaaaataccctgagaacactattagaaaattttaattttgctaaattactaatgatgtaattacatcccgtaatgaactgtcattttcaatcattttagcaactcttttaactgccattaatacacttgaatgacttctcttaaatattttgccaatttgttgaaattgcatgttgtacttttgacgcaaaaggtaattacacacatcacgaacacggacaagttctgctttacgattttctgaaagtacactgtccataggaacattaaatctacggcaaacgttctctattaataaataaggatcaaagctctttttatgaaacttctcaaattcttcaaaaagaatttcttttaaattttcagtatttattaaattttgttttgaagttttagcaaaaaataataactttgttgcaattccatttaaagcacgcacatcgttacctgaaatttgtgctgcatcatgtcttgcctcattagttatttggatgttaggatctttttcttttaatttaacagtaagtatttcacaaagtgaagacaaattatgcttttctatctttagtaataatcctgatttaaagcgagaaatcattcttgcatcaatatcaattagttcatcaggagccttatcagaaactaaaacaatttgttttttatttagaactaggttattaaaaatattgaaaagaatttctaaggttttttcttttctgccaaatatttgagtgtcatctattaaaactaaatctaaattttcataatttttttttagtttttctatacctttatccctttgataaaaagcatcaacaacttcttgggcaaaatcacttgaaacaacatactttactctggcatttggaaaattacgaaatttttcatttcctattgcttgtagtaggtgagttttaccaagaccggtttctccgtaaataaaaagcggtgaaaattcgttatcttgagtttcagctaatctaacgcctgcttcataagctcttttatttccttcactaattacaaagttttgaaaagtatagtttttactcaatccagaattttgataaagagtatcacgactattttcttctaattttgctaagttaaaaaagaaatcttgctcattaacaaaattaacacttttaattccttcatacaaactttcagctaaatgaataatttcagaattatcatttaaggaattacgagcaaattcattttctaaaagaattaaaagaacattatttttaaatacgaaacgattaatgtctttaatgtatttatcatgaaaacctattgttttttcataatgcttttttaatagagatttaaaggcattaaattgttccattattcttctataacattgtcaagaatgatagttaaaattctcgaaattgggatattaactgctttggagtaatttctaactttttgtcatactctttgacttgtatagaagtgtacacctgtatctagtttttcttggcgttcaacaggaactattcctggtatttttgttttaggttggggaggaataggctgtggttgtgtgaattgttgttgaaaattttgatttttttgctgtaagaaaccattattatgatattgaaaattttgttcctcttgaaaatatctctctttttttggttttccagaaaaatttgatgaaaaagattttccttcatttcaattttcaagattattttcattttgttgatttatttgctcaggctgttgaaatgaattattttttgatcaaaaagattttggaaaggttttttcaaaagcagataaaggtccaaaatcaaatgaagatgaatctttgtcaaaagatgtttcttctctttttgacaaattttgtttttgattaaacttatttttattttggggtgttactttttcttttatggaaaacaaatcttcttctaaaagactttgttctgggtcatcatcttgtgctaaatcaaagaaaaaacgtttctttttgttattaatggacattgtaatttgctaaatttaggatttcttttgttatttctaaatactcatttagatattttttacttggtgatgatactaatgatattggcaatttttcataacctacagctgctgatgattttgatgtcagagaaacaaaatttttagaaaaagctacattattttttttagcttttgttttagctaaatctattacttcattatgaagacgagtacgaacgttaacttttgtaggaactaaaatagttttaagatttgtatttttttccttaaatgtatctattgtttcaactattctcatcaaacctagcatcgaatattgatctggttcaaagggaataactatgacatctgataaactcattgcagtagaaactaaagttgccatatttggtggtgtatctaataaaacaaattcatatctttttgctagttgcttaactatttctgctatatctgaggccttatattttttacgtgatatgtctatatcagcaaaattaagttcaaaattacaaggaagaatatcaagtccctcatatacagatagcaagcaatcatctatttcaatgaaattatttgaaccactgaattttggaaccttcaacaaaatgtcaattaacgtgttattcaatctttcagggttttgtccaaatgatgcagaaacattcccctgcccgtcaagatcaagaatgacttttcgcctttctggacaaagtttaaccaatgatcctgcaacattagttgccattgtagtttttaatacgccgcctttattatttacaaaagaaatgatcatatatttaaatgattataatatttctttaatactaaaaaaatac
